United States Patent Application Publication US 2014/0128277 A1 - sequence listing, part 8

SEQ ID NO: 6658 - DNA, 9247 bp, Homo Sapiens
  NM_175624
gcttccggcgcaggcgcagtcccgcgttccctcggcggctgccggcgtagtgagcccgccgccgtggagtgtagcggaaagggctcgccgtcctcctccgtttctcgctgcttcgggacgcgctctctgcggctctgtgagcgcccctgagcgccggcagcggccgcggtgggttcttcaggttatcttatgatgaggcttttgctatggctaatgatcccttggaaggcttccatgaagtaaaccttgcttcacctacttctccggaccttcttggtgtgtatgaatcaggaactcaagagcagactacctcaccaagtgtcatctaccggccacacccttcagctttatcctctgtacctatccaggcaaatgcattagatgtttctgaacttcctacacaacccgtgtattcatcccccagacgtttaaattgtgcggaaatatctagtatcagctttcatgttacagacccagccccttgctctacctctggagtcacagctggattaactaaattaactacaagaaaggacaactataatgcagagagagagtttttacagggtgctactataacagaggcttgcgatggcagtgatgatatttttgggttgagtactgatagtctgtctcgtttacgaagcccatctgttttggaagttagagaaaagggctatgaacgattaaaagaagaactcgcaaaagctcagagggaactgaagttaaaagatgaagaatgtgagaggctttcaaaagtgcgagatcaacttggacaggaattggaagaactcacagctagtctatttgaggaagctcataaaatggtgagagaagcaaatatcaagcaggcaacagcagaaaaacagctaaaagaagcacaaggaaaaattgatgtacttcaagctgaagtagctgcattgaagacacttgtattgtccagttctccaacatcacctacgcaggagcctttgccaggtggaaagacaccttttaaaaaggggcatacaagaaataaaagcacaagcagtgctatgagtggcagtcatcaggacctcagtgtgatacagccaattgtaaaagactgcaaagaggctgacttatccttgtataatgaattccgattgtggaaggatgagcccacaatggacaggacgtgtcctttcttagacaaaatctaccaggaagatatctttccatgtttaacattctcaaaaagtgagttggcttcagctgttctggaggctgtggaaaacaatactctaagcattgaaccagtgggattacaacctatccggtttgtgaaagcttctgcagttgaatgcggaggaccaaaatcacttctgtatgtaacttttttacatacattcgatacattcagcagggactcgtgaaacagcaggatgttgatcagatgttttgggaggttatgcagttgagaaaagagatgtcattggcaaagctgggttatttcaaagaggaactctgatgctctgcgtgggaccatgcctgaactccccgaataactgaaaaatggctgaatatttttatggttacttgatatttatttccaaggagtgagcctaagacttttttccccttttgcaaattgctctaagaagtaccatgatttcttttaaactgatctatgctgtgtttgcttattctttagttgaacacactatgaagaattccaggtgtactagtgaatgtaatttatagttgccaaaaaaaaaaaaaacctgaaataaataaatgttagattgaatgtgtgtacattttctcttctagctctgacatggcatttagggttagcagaatgtattaaatagtaattttcaaactacacagtagcttccttccttgtgagaggcaagaaagaagtctgagtggatagtactcactttccaaggcccccacctctagaatggctttatttttatctgttttctatattgggtttcaaaaaagattttatttgaagaaatacttctgctgctacaaagtttgaaagttactattttaattattctgctctctgtaactgaaagaatccctttattttggttattcattaaaatataatagaaggcagtcagattttatcccagagatgtattcctgagtgtcttgatatagtgtattcatgttttatatgtgttgaccactatattgtcattggagggacatagatgtaaatgagtttgacgtgtgtcaaaggggtttaaaggggtgtggattgaatgaatggtacgtgcgaagtatatgctgattatagaaccacttgatctctgcattccaaattgtaaaactgactcaactggagaaattataacaaagaggtttgtggtagacatgtaataagtatagaaaagcaaaaagaaaagagaaactgctttagtttctgtttagagaaagctgctgttaatatttttggatagtagcctttcagctttcagatattttctacttacatatgcatatttttgaaacaaaaagtaggctttttttttgctttttaaacctaaacattaaatatattttcccttgggtaaacctacacatcctaatccctgtttatagaattttaacataatttaattgtgtttggagatgaggtggttttcagtttatttttcatattataatgctgtgacgagtatccttatctgtacacttctgaacattgtggagttctttcatgtggatgcctggagataaaattgtgtcgagatatatatgtatttttaaatgtttgatctgcattgctagattgccatccagaaaagttaatcaatttgtattcacagcagcagtgtacaagagggctggttttctgaagataacatttttttcagtcctgttcagaggtttggtcaatcttacctgtagatgacttcagccaccaggctggatgggagcccacagacaaaaggacattggtgtatgttatggtgaaaaccatcagtaccatgcctagctcaagaatgtgaaattgaacctgaaaaaaactttgaacctacaattttatgttctgaaaatagttattctaatgtgagggcattaataagaatatgtaccatcaaagcttcagaagattttccgtacaaactaaaatcacttttggagaaagtacctaaataaaaagagaaacaaatccaggagatactgtacggtttgaaagaaaggtaatcaaatactcagaaaaagtttgttgatgacttaaaaaggataaataaaaagtaagactaaagaaaatcagtatacccattaataataaatctttagtaatctataaggggaagaatgcttttcaaccttatacactagaagcatgctctttaaaattaatgcaacaggatgacgacttgatgtagaaactatatgtggaattatagattaaaatgtgattgaaacatatttagaaaatgtgattatcttcctgatcctactccctttaggaagaacttcttaaactggaagcaggaaaaaaaaaaaccataaaagataaccataaaagaatataagttatggtatattataaattcttaatttagaaatcgtgcatcagtagttaggcattgtggctcatgcctgtaatcccagcactttgggaggcagaggcagaaggattacttgagctgcttgagcccaggagtttgagacgggcctgggaaaaatagggaaactccatttacacacacacacacacacacacacacacacacactgtgtccatgaacttgggaggatgaggtgggaggattgcttgagcccaggggttcaagtccaacttgggcaacatagggagaccttgtctctaaaaaaaaaactaaagctaaactacaaactgtgaggcaatatctgcaacatttataactagtaatagcttagtatcaagaatgtatgcagaaattctacaaaccaacaaaaaaggacagtgtcacagaaaaacaggcaaaagactgaaccaggccttccacacaattagaagtgcatgtgggccaataaacattaagaggttttcatctctcaatcaggaaaacgtaaatcaagatgacaatgacatgttcaaattcattcgattggtgaaaatgaagaaacacaaagtcaagttttggagagggttttagtcattaggatcactcacatattgctgatgggggtatcaattggtatatccactgtgaaaaaccattcactagaaaagttgggccaggcccagtggctcatgcctcttggctttgggaggccaaggtaggaggatcacttgagcccaagagttcaagaccagcttgagcaacatagggagaccacatctgcacaaaaagatttttttgaattagctgggcatggtggtgcatgcctgtggtcccagctacttgggaagctgaggtggaaggattgcttaagcccaggaggttgaggctgcagtgaatcatgattgtgccactgcactcttaccttgggtgacagagtaagatcataccttaaaaaaaaaaaaaaagtatacccatgggtcagcaatttcacttttcagtatatacttgagaaatgcttgcacaggtcccccagatcacacatataagaatgttctggaataaattaaaatgtctatttttaggaaggtgtaatgtgttcacagaatgggtgattattacatggcagcaaaatgaatgaataccagctacttgcagcacaataactcagaatgaaaaagcaattctgagaaaactatatgtgacatgatacttttcttataaaagtcaagaacaactaaaactgaacagctgtttaggcattgacatatgtgacaaaacttttaaaaagtaataaagttcaagatagtggttacctctggagaggtagaggaggagcaaatctatgagtaagtcactggtaatgttttagtccctgggttaggtggtgggttttggggtggttcatttgtcattaaaagtaagtacatgagctgggtgtagtggtgcgtgcttatagtcccagctacttgggagtctgagataggaagatccttgaggccagttcaaggctatagtgtgctatgatttcacctgtgaatagctactatattccaacctgggcaacgtagaccttgcccccctttaaaaaaattcaaaaacaaaataaatgcatggacaaatgaataagagagttatgcatggaacatcggtggtgtattatgaatcaagcattattactagctcagttatatgtgccttcattccaaaacaaaaaataaaaggtaagaaaattgttgaattgcatttgagagagaggaaaggaaagaattcaggtctgaatcttaggcttttggcttgagctattgcagtttattgagatggggaaatacatggtggggaaagtttgggtatgtgcataacagagacagaaattcagtgtttgacagatcaagtgtgaggtgcccactgagcatcaaagtggatatgttaagcaggtattggatgtacaaatctaaattcagtaaggtcagtccaggagaaaatttggggagtagttagccatgggatcagatgggcgctttagggacactttggagatgaagtacagcactgagccctgagttcctgtgacagagaagcagcctgcaaagacgaaaggaggagctgttaggaagagcaaggcaacagaaaaggaagaaccagcatgctgattatgttcaggagagtgtttctacgctgaatttaattgccaagattaccaattctaaagaagaggaggactcttggacaagtttttagaagttggtttggagctggggtgagagcctggcctaatggagacagctctggattgggagtcacttagacctacattctggtctaggtttggctcccaaaaactgggaaggttagttaggtggccactcctctctcttcatggtctctctcagcttgaagacaatttacagtctttgactaagcatccacactggaagaacaagatttggtttctgaacattgggtcttagtccttaaaataacttgcaacctgttacgtcttcacttactcccatcgccaccacaagaatcctgtgtgtttttgttttgtgcatccagtctaaaacgggtctgcttttattcataggcttttgttttcagtggtttttgttgttgcatttttccctagataaaatgttttttctataagacactgcttaaaagagtccaatgcagtatgaatttgtatttgtgtttaacttttgtgcttaacagatctgccatggctgaactctcagttgcttaagcaaaattctggggcttattctaggttcctttatttgtcattgtcactcccattccagttatcagcaaattccatcagctgtctccgagacatcttaaatctgtctacctccctccatgtccactgctaccactctgcccaagctattatcatctttcacctgaactcctgcactaatgtctgctgtccttgcatccactcctgccctcctacaatcactgacggcagccgcagggatctttataaaacgaaaatcagataatgtcacttccctgcttaaagccctttgagtggcttcccattgcacttagaaaaaaaaaaaaaaaaaaaaactggccaggtgcgatggctcatgcctgtaatcccagcactttgggaggccgaggcgggcggatcccctgaggttggtagttcgagacctgcttggccaacatggagaaaccctgtctctactaaaaacacaaaattagtcaggtgtgatggcgcatgcctgtaatcccagctacttgggaggctgagtcaggagaaacgctcgaacccaggaggcagaggttgtggtgagttgacatcacgccattgcactccagcctgggcaacaagagtgaaactccgtctgaaaaaaaaaaaaaaaaacccaaactcaatagaaaatcaagttttcatagtggtagttgttaacagagaaataacaatgaaagctttaaaaaactccatgaaaatttgcaaaacttaaaaaaaaaatgtagaagaggactaaacttgataaaatattaaaagaattgaaacccttcctaaaggcagcttctcaagggagcacaagttcacacacagtttacttttggaggaacgtctgaggtcatgaggactagattctagagctacaggtctcagggacagtctcgagggatacagggcccccatcaccacatccccagatttaaccgcagcagctcagcttttatctgtatctgttggagctctctaggaaatgtcaataccaaagcaaacccaaatcacaactagattagattactattcaagagaatgattctctaccgaaactctgcaaaatggggatatcaagagagttggaaaatgtaagacgtaaagaccataatcaggaaaatacgcatcatatttgttattcactgagagggaggaatttccacttaaatcctatttccagcagctggattgtgctctcagtggagtgctctggattctgattaatagagattttctagtcctcccagcaacttccttctcaattctcttcactttccgcagatctcggcaccagggttgcatcttgtgggctccattgtgttttcacacaatgtgctatttgtccttcacagtgttttggtttatttttctgtttgtccatcttgtttttgaacaattgccagcatttaaaaatgaggaaatctaaaatctgcatttcaagctgctcttttttaaaatgtgccgtttcgacaacactgagcccacagtcttgaatgacaacacttgggtggagctgagtgactccacctgtcgggtggctacacccttgctcagggtatgcactccatggtttgctctatggcccaccatcctggattgtctccctgacaccaaggctaagggacccactttactcacttatctgctgggccttggaagtatttcagttcggaaccccaattctaaccttagcttctcaggccattaaatgaaatctcatttctatgatgcttcctgtcacatcactgtgctgctgagaacatgaagtctgtgggtgaattggtggacgggatccagaatcattacttggcagtggattatagtgtgatgactcatttccggtggtctccaggagacttggctgggagcttctcttggagtctagggttagccagaggctacatgttttaggcatcttaattcatattttatctaaaggcatataaatccttaaaaaaaatcatttgacttcatccttgctccctacatccagccagtaaccattgctttgttttacatcgcgtgcttcaggctttactacagcctacctggattttgcagtagcttcttaaactgcttaaactttggatattgccccagccaacacattctgccacagagatctctctgagttaaatgggattgtatcatgccccacacccaagcagatagaaactgtcaatagatacacttagaatgaatatgcatggaatcaaattacattcagaatctaccactataggtagtgaatacaacaggatagcagaggctgggaagggtaatgggggttggggggtgggaggataaaggggttgggtaatgggtgtaaaaatctatagaaggaatatgatctgttgtttggtagcacaatagggtaaatacagttaataatttattgtatatttcacaataaaggagtggatttggaatgttctcaacacaaatgataaatgtttgaggtgatggataccccaattaccctgatttgatcattatacgttgtatgtttgtatcaaaatatcatatgtaccccataaatatgtacaactattatgtatccataaaaattggaaataaactaccaccatctttcttcagcctattttcctatctcctctcgcaccatactaggcacacaatctctgtacctgtgctgtcttccaagccattgctcatgttttaagaaatatacttattgtttaatatatcctgtaccactgtaggatgactgtagttaacaataatgtgtagtttcaaatagctaatagctggaaggaagttgttgaatgtttccaacataaagaaatgataagtgtttgagatgatggatatgctaattaccctgatctgatcactacacattatatgtatggaaatatcattgtgtaccccatgaatatgggcaattattatttgttaattaaaaaaataaaaaaaagacccacccactgtttaa

SEQ ID NO: 6659 - DNA, 1808 bp, Homo Sapiens
  NM_175630
gcagtgggctctggcggaggtcgggagaactgcagggcgaaggccgccgggggctccgcgggctgcggggggaggcacttgacaccggcccggggagaggaggggccgctgtccctgcggccagtgctggatgcggggacccagcgcagaagcagcgccaggtggagccatcgaagcccccacccacaggctgacagaggcaccgttcaccagagggctcaacaccgggatctatgtttaagttttaactctcgcctccaaagaccacgataattccttccccaaagcccagcagccccccagccccgcgcagccccagcctgcctcccggcgcccagatgcccgccatgccctccagcggccccggggacaccagcagctctgctgcggagcgggaggaggaccgaaaggacggagaggagcaggaggagccgcgtggcaaggaggagcgccaagagcccagcaccacggcacggaaggtggggcggcctgggaggaagcgcaagcaccccccggtggaaagcggtgacacgccaaaggaccctgcggtgatctccaagtccccatccatggcccaggactcaggcgcctcagagctattacccaatggggacttggagaagcggagtgagccccagccagaggaggggagccctgctggggggcagaagggcggggccccagcagagggagagggtgcagctgagaccctgcctgaagcctcaagagcagtggaaaatggctgctgcacccccaaggagggccgaggagcccctgcagaagcgggtgagtcctcagcaccaggggcagcctcttctgggcccaccagcataccctgagagtcagggacttggctctccagcaggtcccaggaaggatggtctgggtcgtggctaaaggtctgcttgccaaggctatggcctggaggctactggctggatgcagcctgcgcatatgttttatttggcccatagagtgttttaaacatttaaaaaattagttgccagtatttaaaaatcaaaaaatttcacataaaaatctggagttttggcttctcatgaaaaaaaaaaaagctagatctggcaacagcgggctttcataacgccaacgattgctagactgggataatggcggtccctccatcgccttctgtggctggttgtgggccttagttttctgcagctctacctggcctgcttactctcccacgtgccatgcagttcctgggggttgctgtatttgtagcccctggcctgggcactcaagggcagcagataccctgtttgcctccctgagtgcagaggtcctgagcccaccctagttgggctgactcaactggaaatttggttgtgacagtggcgtggggagagggctgggtgattgtattctgtgtactgcccagcccaggcctcttcatctggggactttttggcctaaccctggaagcctggaaagttgcccacttttctctttcaggttaagccagcaatttcagggccaaccgagctgtaaacatgttagtaatgaggacaactagcatttgtacagggcttcacagtttacaaagcgctttctcatacattatcacatttgatcctcccagggccctgccaggttgttttgcatatgtgcattttaatttcaaaaagtcttccttccaagcgtgtatgatgaaatgagtaaattgattaattggcgtaacttattttgcatggatccaacctaatgttcatgcaggatagagaacatttccagaatacaaatttccaaacttaaaaaaaaaaaaaaaaaaaaaaaaaaaaaaaaaa

SEQ ID NO: 6660 - DNA, 3964 bp, Homo Sapiens
  NM_175709
ccagccccagcatcgcgcgccgcagccgcggccccgcagctccgcccccggcccggcccggccccgggcccgctcgcccgccgccccgcatggagctgtcagccatcggcgagcaggtgttcgccgtggagagcatccggaagaagcgcgtgcggaagggtaaagtcgagtatctggtgaagtggaaaggatggcccccaaagtacagcacgtgggagccagaagagcacatcttggacccccgcctcgtcatggcctacgaggagaaggaggagagagaccgagcatcggggtataggaagagaggtccgaaacccaagcggcttctgctgcagcggctgtacagcatggacctgcggagctcccacaaggccaagggcaaggagaagctctgcttctccctgacgtgcccactcggcagcgggagccctgagggggtggtcaaggcgggggcacctgagctggtggacaagggccccttggtgcccaccctgcccttcccgctccgcaagccccgaaaggcccacaagtacctgcggctctcgcgcaagaagttcccgccccgcgggcccaacctggagagccacagccatcgacgggagctcttcctgcaggagccaccggccccagacgtcctgcaggcggctggcgagtgggagcctgctgcgcagccccctgaagaggaggcagatgccgacctggccgaggggccccctccctggacacctgcgctcccctcaagtgaggtgaccgtgaccgacatcaccgccaactccatcaccgtcaccttccgcgaggcccaggcagctgagggcttcttccgagaccgcagtgggaagttctgaatcaccgtttttactcttcttaaactgttttcttttgggcttggggtgggacttccagagatagggatgggttgggggcggggtaattattttatttaaaaaaataccgagcagcaaaaggggagaagatcccactactctcccaccacctgccctttctctgagggacgtttaccacgaggcctcaggctggggatggagagagttgctctgggagttggggtaccacccccagggcaggatggggacaggatcacctgcccgggacaccaccattatcattctcctctagtgacgcagcagctggttctgggagttaaaggagcattggaaggcccaaaccctctcccttgagtggccaccccagcctggttggctggttttccccttttctcttgtttcaattgggtctttaccttgaactctcctctctggctttgcggtgggctgtggaggctggttttgaccaaaagtgagtggggcgggaggaaggggcaggaggaagggttgaggttacttggggcgagtcccttccccttcagagaggcttctatccttcccagggaggaggcgccgctgagacccttctgctgagagctctgccctcccctcatcacctggcctgtgcagaaacgctcatgcacacctggctgcacaggtgtgcacgcattacccttcgcgtgtacgttcccatgtgccccgtgaaagcatgtgtggctgcagacgtgtccacatgggccttgcgaacctgggttagaaaccctggccaggcgaacgtggggtgattcacagcacaaaagacctcaccaccacacctgcactcaccccaccttgcatgcaccttgctacctgcttgcggctttcagtggagggcaggggtctggcacaggtgcgatggcaccccatgctccaggcatacagatgtggtttctcggctgcaccgggccaggctgcgggtgtgcaggcgtctgctaagttgtgtgatgtatcagcacaggctttgagacgtctggaccctgtccttcctcccgtgaggggttcttgttctttctgactcaggtgacttttcagcccttccaattcccctctttttctgccctcccctccaactcagccaacccaggtgtgggcagtcagggagggagggagtgtcccaccacgttctcagggcagcccttgactcctaagccccttcctccttccattctgcatcccctccccatccaacctaaatgccacagctggggctgagctgtattcctgtggagggacctctgccgtgcctctctgaggtcaggctgtgctgtgtgatgggcaggctttgccccagcccacccctggcaaggtgcacttgttttctggtttgtacaaggtgtcctgggggcccgtggcttccctgccagtgaggagtgacttctccctctcttccagtcctgtaggggagacaaaaccagattggggggcccaaggggagcatggaaaaggccggctcccctgtctttccttggctgtcagagtcagggtaacacacaccaagagtggagtgcggccagcaagtttgagacctgcccgccctcctcgcagctctgctctgtgtcctcaggaagtcacagagtctactgaggcaaggagagggtgattctttccccaaatcccttcttccctggttcccaaaccaaagacagcctgcagccctttctgcatggggtgctctgttgacaggcttcccagatccctgagtctctctttccttcctcctcgatctttagttgtccacggtcaattcagtgcttccattgggggacagtcccctccgggatgacctgattcacctccagcccagggaatggaatctagaggaatacgtggggtgggtctggacaaggagcggcaggaatcaccacccatctccagctgtggagccctgtggaggggaaggggaagcttggggttcagaggggactcttccaggagaggggtgcccagcggaggtaaagatgatagagggttgtggggggtctctagttgaatgttttggcccatgactttggaacatggctggcagcttccagcagaagtcacgctccccatcccccaggggacataggacctttttcctgcttcctggtcactttcaaagaactatttgcgcaatctgtgggtctgtggattcacggggctttctgtgtgggtgctgcagttgcttttgtctgcagcagcaggacacatctttcctcttactcagccctttatggcccatggggaactccgtggctcagggagagctgaactccaggggtgtgacctgggacgggtgggcctgaggtgcccagctcagggcagccaggtggctcatgggctgtagtgagccagctccctgggggaaaaggctgtgggccgttaggaccatcctccaggacaggtgacctctatgaggtcacctacggctgtggccgtgcaggcctccttccagcccagagtggcccagtagagcaaggcagacagtgacctccacccccgcagccctcttaaaaggccagtactcttgggggtggggggagggtttagaaagcatttgcccatctgcctttctttcccccagcccccacccgctttgaatgtagagacccgtgggcacttttccttttgtggtggggggtgcggaggaggtacccccacccctggcacagccgcctggaatgcaggactgtcactgctgttcgggtgatgacctcgttgccaagctcctcctgtccccttgttctgggggcaggcgctgtgcttctgtgaggtggtttagcttttgctttcgaagtggccagctgcggccaccaggtctcagcacaagagcgcttcctttgcacagaatgagcttcgagctttgttcagactaaatgaatgtatctgggaggggtcgggggcacgagttgattccaagcacatgcctttgctgagtgtgtgtgtgctgggagagtcagagtggatgtagagcgcggttttatttttgtactgacattggtaagagactgtatagcatctatttatttagatgatttatctggtaaatgaggcaaaaaaattattaaaaatacattaaagatgatttaaaaaaaagaaaa

SEQ ID NO: 6661 - DNA, 1653 bp, Homo Sapiens
  NM_175728
aaacaaaacagaaatgcaacgctttagagtacccacggaaaacttgtttaccttgtcaccatgagtaaaagttaattcccactcctgaagagagcaaaccaactctgaaagagagtgaaaatgcagacaagacagttatcagataatggctatctggacgagagattctttcgtttgacagcagtttggttgttgggagttccagttcagctcctgcacagttgctctgtacaaatcctcctccatatttgcttagagaaaacgtgttgccatcccatcatgaaggaagctgcctgagagtttttaaccattacagccgtgatgatgaaagagtgaagaaccgcctctaagttaaaaagtgcacccagagataaggttcgttctcaatgccctgccgctgcttctcatcgcatggccaccgcatttctcaggccaggcacattgagcattggtcctgtgcctgacgctatgctagatgctggggttgcagccacgagcatagacacgacagacacggtcctcgccatcttctgttgagtactggtcggaacaagaggatcgtctgtagacaggatatgatcatcgtggcgcatgtattactcatccttttgggggccactgagatactgcaagctgacttacttcctgatgaaaagatttcacttctcccacctgtcaatttcaccattaaagttactggtttggctcaagttcttttacaatggaaaccaaatcctgatcaagagcaaaggaatgttaatctagaatatcaagtgaaaataaacgctccaaaagaagatgactatgaaaccagaatcactgaaagcaaatgtgtaaccatcctccacaaaggcttttcagcaagtgtgcggaccatcctgcagaacgaccactcactactggccagcagctgggcttctgctgaacttcatgccccaccagggtctcctggaacctcaattgtgaatttaacttgcaccacaaacactacagaagacaattattcacgtttaaggtcataccaagtttcccttcactgcacctggcttgttggcacagatgcccctgaggacacgcagtattttctctactataggtatggctcttggactgaagaatgccaagaatacagcaaagacacactggggagaaatatcgcatgctggtttcccaggacttttatcctcagcaaagggcgtgactggcttgcggtgcttgttaacggctccagcaagcactctgctatcaggccctttgatcagctgtttgcccttcacgccattgatcaaataaatcctccactgaatgtcacagcagagattgaaggaactcgtctctctatccaatgggagaaaccagtgtctgcttttccaatccattgctttgattatgaagtaaaaatacacaatacaaggaatggatatttgcagatagaaaaattgatgaccaatgcattcatctcaataattgatgatctttctaagtacgatgttcaagtgagagcagcagtgagctccatgtgcagagaggcagggctctggagtgagtggagccaacctatttatgtggggttctcaagataaaggagataacatccagctttcctgccccacaccgtatctgaaataaaaacaacagcagggatagcagatt

SEQ ID NO: 6662 - DNA, 2044 bp, Homo Sapiens
  NM_175840
gggacgcgaggcggagcggggccccacacaggccgcggcggctggctcgggcccctacggtcccggcggcggctggaggaggaagccaggcggctggcggaggaggagagacggaggaggccgagaccggagcgccgctcgccgcagacttacttccccggctcagcagggaaaggttcctagaaggtgagcgcggacggtatgcaaagttgtgaatccagtggtgacagtgcggatgaccctctcagtcgcggcctacggagaaggggacagcctcgtgtggtggtgatcggcgccggcttggctggcctggctgcagccaaagcacttcttgagcagggtttcacggatgtcactgtgcttgaggcttccagccacatcggaggccgtgtgcagagtgtgaaacttggacacgccacctttgagctgggagccacctggatccatggctcccatgggaaccctatctatcatctagcagaagccaacggcctcctggaagagacaaccgatggggaacgcagcgtgggccgcatcagcctctattccaagaatggcgtggcctgctaccttaccaaccacggccgcaggatccccaaggacgtggttgaggaattcagcgatttatacaacgaggtctataacttgacccaggagttcttccggcacgataaaccagtcaatgctgaaagtcaaaatagcgtgggggtgttcacccgagaggaggtgcgtaaccgcatcaggaatgaccctgacgacccagaggctaccaagcgcctgaagctcgccatgatccagcagtacctgaaggtggagagctgtgagagcagctcacacagcatggacgaggtgtccctgagcgccttcggggagtggaccgagatccccggcgctcaccacatcatcccctcgggcttcatgcgggttgtggagctgctggcggagggcatccctgcccacgtcatccagctagggaaacctgtccgctgcattcactgggaccaggcctcagcccgccccagaggccctgagattgagccccggggtgtgctaaagaggcagtacaccagtttcttccggccaggcctgcccacagagaaggtggctgccatccaccgcctgggcattggcaccaccgacaagatctttctggaattcgaggagcccttctggggccctgagtgcaacagcctacagtttgtgtgggaggacgaagcagagagccacaccctcacctacccacctgagctctggtaccgcaagatctgcggctttgatgtcctctacccgcctgagcgctacggccatgtgctgagcggctggatctgcggggaggaggccctcgtcatggagaagtgtgatgacgaggcagtggccgagatctgcacggagatgctgcgtcagttcacagggaaccccaacattccaaaacctcggcgaatcttgcgctcggcctggggcagcaacccttacttccgcggctcctattcatacacgcaggtgggctccagcggggcggatgtggagaagctggccaagcccctgccgtacacagagagctcaaagacagcgcccatgcaggtgctgttttccggtgaggccacccaccgcaagtactattccaccacccacggtgctctgctgtccggccagcgtgaggctgcccgcctcattgagatgtaccgagacctcttccagcaggggacctgagggctgtcctcgctgctgagaagagccactaactcgtgacctccagcctgccccttgctgccgtgtgctcctgccttcctgatcctctgtagaaaggatttttatcttctgtagagctagccgccctgactgccttcagacctggccctgtagcttttctttttctccaggctgggccgtgagcaggtgggccgttgagttacctctgtgctggatcccgtgcccccacttgcctaccctctgtcctgccttgttattgtaagtgccttcaatactttgcattttgggataataaaaaaggctccctcccctgccaaaaaaaaaaaaaaaaaaa

SEQ ID NO: 6663 - DNA, 2134 bp, Homo Sapiens
  NM_175842
gggacgcgaggcggagcggggccccacacaggccgcggcggctggctcgggcccctacggtcccggcggcggctggaggaggaagccaggcggctggcggaggaggagagacggaggaggccgagaccggagcgccgctcgccgcagacttacttccccggctcagcagggaaaggttcctagaaggtgagcgcggacggtatgcaaagttgtgaatccagtggtgacagtgcggatgaccctctcagtcgcggcctacggagaaggggacagcctcgtgtggtggtgatcggcgccggcttggctggcctggctgcagccaaagcacttcttgagcagggtttcacggatgtcactgtgcttgaggcttccagccacatcggaggccgtgtgcagagtgtgaaacttggacacgccacctttgagctgggagccacctggatccatggctcccatgggaaccctatctatcatctagcagaagccaacggcctcctggaagagacaaccgatggggaacgcagcgtgggccgcatcagcctctattccaagaatggcgtggcctgctaccttaccaaccacggccgcaggatccccaaggacgtggttgaggaattcagcgatttatacaacgaggtctataacttgacccaggagttcttccggcacgataaaccagtcaatgctgaaagtcaaaatagcgtgggggtgttcacccgagaggaggtgcgtaaccgcatcaggaatgaccctgacgacccagaggctaccaagcgcctgaagctcgccatgatccagcagtacctgaaggtggagagctgtgagagcagctcacacagcatggacgaggtgtccctgagcgccttcggggagtggaccgagatccccggcgctcaccacatcatcccctcgggcttcatgcgggttgtggagctgctggcggagggcatccctgcccacgtcatccagctagggaaacctgtccgctgcattcactgggaccaggcctcagcccgccccagaggccctgagattgagccccggggtgtgctaaagaggcagtacaccagtttcttccggccaggcctgcccacagagaaggtggctgccatccaccgcctgggcattggcaccaccgacaagatctttctggaattcgaggagcccttctggggccctgagtgcaacagcctacagtttgtgtgggaggacgaagcagagagccacaccctcacctacccacctgagctctggtaccgcaagatctgcggctttgatgtcctctacccgcctgagcgctacggccatgtgctgagcggctggatctgcggggaggaggccctcgtcatggagaagtgtgatgacgaggcagtggccgagatctgcacggagatgctgcgtcagttcacagggaaccccaacattccaaaacctcggcgaatcttgcgctcggcctggggcagcaacccttacttccgcggctcctattcatacacgcaggtgggctccagcggggcggatgtggagaagctggccaagcccctgccgtacacagagagctcaaagacagcgcatggaagctccacaaagcagcagcctggtcaccttttctcttccaagtgcccagaacagcccctggatgctaacaggggcgccgtaaagcccatgcaggtgctgttttccggtgaggccacccaccgcaagtactattccaccacccacggtgctctgctgtccggccagcgtgaggctgcccgcctcattgagatgtaccgagacctcttccagcaggggacctgagggctgtcctcgctgctgagaagagccactaactcgtgacctccagcctgccccttgctgccgtgtgctcctgccttcctgatcctctgtagaaaggatttttatcttctgtagagctagccgccctgactgccttcagacctggccctgtagcttttctttttctccaggctgggccgtgagcaggtgggccgttgagttacctctgtgctggatcccgtgcccccacttgcctaccctctgtcctgccttgttattgtaagtgccttcaatactttgcattttgggataataaaaaaggctccctcccctgccaaaaaaaaaaaaaaaaaaa

SEQ ID NO: 6664 - DNA, 2260 bp, Homo Sapiens
  NM_175847
tgcgggcgtctccgccattttgtgagtctataactcggagccgttgggtcggttcctgctattccggcgcctccactccgtcccccgcgggtctgctctgtgtgccatggacggcattgtcccagatatagccgttggtacaaagagagtcacaccccaaagcctctttattcttttcggcgtctacggtgacgtgcagcgcgtgaagatcctgttcaataagaaggagaacgccctagtgcagatggcggacggcaaccaggcccagctggccatgagccacctgaacgggcacaagctgcacgggaagcccatccgcatcacgctctcgaagcaccagaacgtgcagctgccccgcgagggccaggaggaccagggcctgaccaaggactacggcaactcacccctgcaccgcttcaagaagccgggctccaagaacttccagaacatattcccgccctcggccacgctgcacctctccaacatcccgccctcagtctccgaggaggatctcaaggtcctgttttccagcaatgggggcgtcgtcaaaggattcaagttcttccagaaggaccgcaagatggcactgatccagatgggctccgtggaggaggcggtccaggccctcattgacctgcacaaccacgacctcggggagaaccaccacctgcgggtctccttctccaagtccaccatctaggggcacaggcccccacggccgggccccctggcgacaacttccatcattccagagaaaagccactttaaaaacagctgaagtgaccttagcagaccagagattttatttttttaaagagaaatcagtttacctgtttttaaaaaaattaaatctagttcaccttgctcaccctgcggtgacagggacagctcaggctcttggtgactgtggcagcgggagttcccggccctccacacccggggccagaccctcggggccatgccttggtggggcctgtgtcgggcgtggggcctgcaggtgggcgccccgaccacgacttggcttccttgtgccttaaaaaacctgccttcctgcagccacacacccacccggggtgtcctggggacccaaggggtgggggggtcacaccagagagaggcagggggcctggccggctcctgcaggatcatgcagctggggcgcggcggccgcggctgcgacaccccaaccccagccctctaatcaagtcacgtgattctcccttcaccccgcccccagggccttcccttctgcccccaggcgggctccccgctgctccagctgcggagctggtcgacataatctctgtattatatactttgcagttgcagacgtctgtgcctagcaatatttccagttgaccaaatattctaatcttttttcatttatatgcaaaagaaatagttttaagtaactttttatagcaagatgatacaatggtatgagtgtaatctaaacttccttgtggtattaccttgtatgctgttacttttattttattccttgtaattaagtcacaggcaggacccagtttccagagagcaggcggggccgcccagtgggtcaggcacagggagccccggtcctatcttagagcccctgagcttcagggaaggggcgggcgtgtcgccgcctctggcatcgcctccggttgccttacaccacgccttcacctgcagtcgcctagaaaacttgctctcaaacttcagggttttttcttccttcaaattttggaccaaagtctcatttctgtgttttgcctgcctctgatgctgggacccggaaggcgggcgctcctcctgtcttctctgtgctctttctaccgcccccgcgtcctgtcccgggggctctcctaggatcccctttccgtaaaagcgtgtaacaagggtgtaaatatttataattttttatacctgttgtgagacccgaggggcggcggcgcggttttttatggtgacacaaatgtatattttgctaacagcaattccaggctcagtattgtgaccgcggagccacaggggaccccacgcacattccgttgccttacccgatggcttgtgacgcggagagaaccgattaaaaccgtttgagaaactcctcccttgtctagccctgtgttcgctgtggacgctgtagaggcaggttggccagtctgtacctggacttcgaataaatcttctgtatcctcgctccgttccgccttaaaaaaaaaaaaaaaaaaaaaaaaaaaaaaaaaaaaaaaaaaaaaaaaaaaaaaaaaaa

SEQ ID NO: 6665 - DNA, 4843 bp, Homo Sapiens
  NM_175852
gaggtggggaagccatcggacgtcggcggtgaggatcttctcctgacccagcatcgctcatcacaatgaagaaccaagacaaaaagaacggggctgccaaacaatccaatccaaaaagcagcccaggacaaccggaagcaggacccgagggagcccaggagcggcccagccaggcggctcctgcagtagaagcagaaggtcccggcagcagccaggctcctcggaagccggagggggctcaagccagaacggctcagtctggggcccttcgtgatgtctctgaggagctgagccgccaactggaagacatactgagcacatactgtgtggacaataaccaggggggccccggcgaggatggggcacagggtgagccggctgaacccgaagatgcagagaagtcccggacctatgtggcaaggaatggggagcctgaaccaactccagtagtcaatggagagaaggaaccctccaagggggatccaaacacagaagagatccggcagagtgacgaggtcggagaccgagaccatcgaaggccacaggagaagaaaaaagccaagggtttggggaaggagatcacgttgctgatgcagacattgaatactctgagtaccccagaggagaagctggctgctctgtgcaagaagtatgctgaactgctggaggagcaccggaattcacagaagcagatgaagctcctacagaaaaagcagagccagctggtgcaagagaaggaccacctgcgcggtgagcacagcaaggccgtcctggcccgcagcaagcttgagagcctatgccgtgagctgcagcggcacaaccgctccctcaaggaagaaggtgtgcagcgggcccgggaggaggaggagaagcgcaaggaggtgacctcgcacttccaggtgacactgaatgacattcagctgcagatggaacagcacaatgagcgcaactccaagctgcgccaagagaacatggagctggctgagaggctcaagaagctgattgagcagtatgagctgcgcgaggagcatatcgacaaagtcttcaaacacaaggacctacaacagcagctggtggatgccaagctccagcaggcccaggagatgctaaaggaggcagaagagcggcaccagcgggagaaggattttctcctgaaagaggcagtagagtcccagaggatgtgtgagctgatgaagcagcaagagacccacctgaagcaacagcttgccctatacacagagaagtttgaggagttccagaacacactttccaaaagcagcgaggtattcaccacattcaagcaggagatggaaaagatgactaagaagatcaagaagctggagaaagaaaccaccatgtaccggtcccggtgggagagcagcaacaaggccctgcttgagatggctgaggagaaaacagtccgggataaagaactggagggcctgcaggtaaaaatccaacggctggagaagctgtgccgggcactgcagacagagcgcaatgacctgaacaagagggtacaggacctgagtgctggtggccagggctccctcactgacagtggccctgagaggaggccagaggggcctggggctcaagcacccagctcccccagggtcacagaagcgccttgctacccaggagcaccgagcacagaagcatcaggccagactgggcctcaagagcccacctccgccagggcctagagagcctggtgttgggtcatgctgggaagggagcggcagcccagccaggcctggcccataaaaggctcccatgctgagcagcccattgctgaagccaggatgttctgacctggctggcatctggcacttgcaattttggattttgtgggtcagttttacgtacatagggcattttgcaaggccttgcaaatgcatttatacctgtaagtgtacagtgggcttgcattggggatgggggtgtgtacagatgaagtcagtggcttgtctgtgagctgaagagtcttgagaggggctgtcatctgtagctgccatcacagtgagttggcagaagtgacttgagcatttctctgtctgatttgaggctcagacccctccctgcccttcagagctcaagacaagtaatacacccaggtcttgactgcatttgtcttgtgagcagggcttgcttggtcagctcaggccctcctagctgctctggaggctcctttgattctctagacctggaaaaggtgtccctaggcagagccctggcagggcgctcagagctggggatttcctgcctggaacaagggacctggagaatgtttttgcgtgggatgatgtgctggtcaggagccccttgggcatcgcttcccctgccctttggtagtgccaggaccaggccaatgatgcttctcagtagccttatcattcacaggtgcctctctagcctgcacaaatgattgacaagagatcacccaaaggattatttctgaaggtgtttttttctttatttctttttctttttttttttttttctttttcttttttttttgcacatgacagtgtttgtattgaggaccttccaaggaagagggatgctgtagcagtggtgcctgggtgcctggcctccagtgtcccacctccttcaccaccccacttggctcctttgccatcttgatgctgaggtttcctgtttggtgagatcaggttgtttgtggtaaaagaaaggaaagggcttctgatggctttgccacaagcttacctgtgggtttcagtcctgagaggccaccaccagttcccatcagcactgtctccatgcagcagttgctgggtcccatgtccagctgcctctttggcttcatgggtttttctgcttcctgcccccacccccacatgtgcaatcctcaagatttgtcctgattctatttcctggcacctccctgcctgtccttggggattctacttcttcctgtgtgggagcccatagctgttgtctaacaggtaagaaatgaaattgaactattgactgggccccagaaatccataaaatggctgcagacagttgtttctgtgtcctgttctacccccactccagtacataactactatgtactgtgtagagccattctatatgctgaatgttctgctgttgcaaacttgccagggtattagccagtgtttgtgccaagcagttttctgggacaacagaatgactcagaccaagatggataggatggttagggctttgcttcttgctgtttttctttgaagctagttcattgtcctgcaggtcccttcatcttccatacctagcccactcttttagcccttaccttaaatctctcagataagttggttcacaaagaatgttaagtactgaatcatgtgtgactgagaccagagatggcaaatgaatggcacaccatttctccttctcctgccccagggcaggtaccactgatctgcatcagagttgcctgctattctctggtgtatccttcacatctaggtgccctcaagcagctgtgtgagtgttgagatctctgccatctctggctgagatactgctgtcctgtgaagtgtttcccatgacctttttcttcccctttgaatccctctgtctggagtagtccttgcctcttcctgctccagtagggccttttccctaccccagcccctgtgccaggctaagctggtacaagagctgccaacctcacagagtgtttgctaggcgagagaggtgcagggaagaggcagaggtatgcaccttcccccttgaagagaggggaaaggcctacagtggcccacataattgcctgactcacacttcagctacctcttaatgcctgtggagggactggagctgctggatcccagtgtggtggtgtaggaggccacagtgagcaggtggccccagctgggtttcccaggtcaggaatgtgggccccaggcaaggtgcagcctttgctcacagctccatccatgtctagaccttcaggccagtctgcagatgaggttccctacctttttcttctcttcattgaccaaatcaaccaatcactacagctgctctgcttctgctttccaaagtagcccaggtcctgggccagatgcaggggaggtgcctatccatgagtgaaggccagtgtcttcctcacctgggtgggtcccacacttgtgacctcagttttaggaccaagatctgtgttggtttcttagattgctagcttttcctccaggggaccacagcaggtgaagctcaagagcgcatggctctgctaatagtaaattgttttcagggccttgtccagctgagagcttcatgtccaccagattctgagaggtgtcagcagcactttttttttttatttgttgtttgttttccatgaggttatcggaccatgggctgagctcaggcactttctgtaggagactgttatttctgtaaagatggttatttaaccctcctccaccccatcacggtggccctgagggctgacccggaggccagtggagctgcctggtgtccacgggggagggccaaggcctgctgagctgattctccagctgctgccccagcctttccgccttgcacagcacagaggtggtcaccccagggacagccaggcacctgctcctcttgcccttcctgggggaagggagctgccttctgtccctgtaactgctttccttatggcccagcccggccactcagacttgtttgaagctgcactggcagcttttttgtctcctttgggtattcacaacagccagggacttgattttgatgtattttaaaccacattaaataaagagtctgttgccttaaaaaaaaaaaaaaaaaaaaaaaaaaaaaaaaaaaaaaaaaaaaaaaa

SEQ ID NO: 6666 - DNA, 3947 bp, Homo Sapiens
  NM_175859
gggtgacgggagctgcctgtgctggaggaatcactttttaggcgcttgttttggaccattgcacaaacccgggtgcaaaccccaagctcaccagcgtgagtgagctgggccagcagcagggaggagaggggaaggtgggcgaggagggcgccgcgcaccccgaggcccgtgtgggcggtgggaagatcccgggggcggctttggacagccccggcagcgaccccttccccagcccgacaggtgagcgccaggccagccgcggggtggagcccgccgtgcccaccggccaccctccccggtgctaccaccaccgcgcagattatatctgggtgttggcacccagccactattctgccaatgaagtacatcctggtcacgggtggggtcatctcaggcattggtaaagggatcattgccagcagcattggaacgattctaaaatcatgtggactccgagttactgccataaaaatcgacccctatattaacatcgatgctggcactttttcaccttatgaacacggtgaagtcttcgtcttaaatgatggtggagaagttgatttagaccttggaaattatgaaagatttttggatattaatctttataaagacaacaatatcaccacggggaagatatatcagcatgtgatcaataaagagaggcgtggtgattacctggggaaaacagtgcaagttgtccctcacattactgatgctgtccaggagtgggttatgaatcaagccaaggtgccggtggatggtaataaggaagagccccaaatatgcgttattgagctgggaggcaccattggagacatcgaaggaatgccgtttgtggaggcgtttagacaattccagtttaaggcgaaaagagagaatttctgtaatatccacgttagccttgtcccacagctcagtgctaccggagaacaaaaaaccaaacccacccaaaacagcgtccgcgcactgaggggtttaggcctgtctccagatctgattgtctgccgaagttcaacgcccattgagatggccgtgaaggagaagatttctatgttttgtcacgtgaaccctgaacaggtcatatgtatccatgatgtttcttccacataccgagttcctgtgcttttagaggaacaaagcattgtgaaatattttaaggagagattgcacctgcccatcggtgattctgcaagtaatttgctttttaagtggagaaatatggctgacaggtatgaaaggttacagaaaatatgctccatagccctggttggcaaatacaccaagctcagagactgctacgcctctgtgttcaaagccctggaacactcagccctggccatcaaccacaagttgaatctgatgtacatagactccattgatctggagaagatcactgaaaccgaggaccctgtgaaatttcatgaagcttggcagaagctatgcaaagctgatggtattcttgtgcctggaggctttggaatcagaggaacattgggaaaactccaggcgatttcttgggcaaggacaaagaagattccttttctgggagtttgtcttgggatgcaactagcagtgatagagtttgcaagaaactgccttaacttgaaagatgctgattccacagagtttaggccaaatgccccagttcctctggtgattgatatgcccgagcacaaccctggcaatttgggaggaacaatgagactgggaataagaagaactgttttcaaaactgaaaattcaatattaaggaaactttatggtgatgttccttttatagaagaaagacacagacatcggttcgaggtaaaccctaacctgatcaaacaatttgagcagaatgacttaagttttgtaggtcaggatgttgatggagacaggatggaaatcattgaactggcaaatcatccttattttgttggtgtccagttccatcctgagttttcttctaggccgatgaagccttcccctccgtatctggggctgttacttgcagcaactgggaacctgaatgcctacttgcaacagggttgcaaactgtcttccagtgatagatacagtgatgccagtgatgacagcttttcagagccaaggatagctgagttggaaataagctgaaatgaatacatgactgggaataatggggactgcctgtgaggcctctgaaataattgaaggcaagatgaaggaactatctgaagaaatcactacactcttagagaatccctctgttctccagcaaacatgggatgtaaagcctcacagggaatctgataatacatacttctgtcaaccagaaccagaggggtagttttcttttccctccagaggcagcctttggtacttaaaatatctgtagctgattaaatttttcccaacaacctcactggggagaaagtgtgttcatgttttgtccagcggatcaggatgttaggatgacgagcaagagtccaggtcactgtgcctttgctgtgttgtatggaaaggatggcagggaacatgctgtaagtaattttgagtaagaaaatgagtcactgtgttacctggaactcagccacagatttgtgtgtggtccaagatcattgcagtttctcaccctgtttatttcctggtaaaagtaaaattgaataggtccaagacttgggggtggcaagtaaggctttgcctcaggcacaaaatttaagggggctccaaaaaactcaggaatcaagatcagcaatacagtctgagtatcccttatgtgaaatgcttggggctagaagtgttttgaatttcagattttggaatatttgcatatacatgcgatatcttggggatgagactcaagactaaacatgaaattcatttatgcttcatatacaccttatatacatagcctaaaggtaatttgatacaatattttaaataattttgtgcatgaaacaaagtttcgactgcattttgactgtgatttctggcatgagatcagttatggaattttccacttctagcgtcatgttggcattcagaaattttgaaattttggagcattttggattttcagattagggatgctcaacctgtatatatattttttaatcgacgtgaaattcacgtaacatagaattaaccattttgaagtgaacaatttggttgcattcactgatgttgagcaaccaccacctttaactatttccaaaacattttcatcactccaaaataaatgcctgtacacactagcagtcactccctatcttcccctccacctgtccgctggcaaccactgatctcctttttatttctgtggctttttctattctggatatttcatataagtggaattacacaatatatgtggtcttttgtgtctggcttcttctgagacagtaggaagggggcttggctttggctcacccccactagagcattttttcatgcattcccactgatcacaaaacccatactactacctcattgacaccatacctgctaacctcgaggctttagtcatacaaagaaaatggcctttctgtattgttcttctgtgctctcataatgcttaaccatgtcttttacttaaacaattccaggaactggccttaggagatccaaatagggaaccaagattgcagagtgtcccatcttgggagggaatgctgaataattaattgatttacagccttgttgccgctggccagaccaccaggtggcccattactcgagatgatcatcacaaccagatgatgctaacctatatcctctacccttcgcgtgctttgtctgggaagtcttttggccccatgtcagtttctattgcattgagagcccaagagcccctggtcagtcaggcttccatttagcatggcgtttgcaaggtttacccatgttgtagcatgtgtcagaatttcattcctttctatggctgaataaaattccattgtatgaatataccacaaaaaaaaaaaaaa

SEQ ID NO: 6667 - DNA, 8841 bp, Homo Sapiens
  NM_175861
agatagaaaaagtagtttgcttggcatctcccaaattatcttgagcaaacaataaaataagaaatgtttcagaagacaattcggctcccaggcccaaaccaaaactcgaacctggtactttttgtaagtgcgggccaagaaaggggctgtaaagttaaagagccggtggcgcctctgaacacacccgggcagggcgagcaggatgtccttgtccagggagaccccttctcctggctttgaggaaggtgctccctatccccgcgggttcctccgccaagcgggacgccgcgccgggcgggtgagagaaagcccgggcaggagagcacagagccggcgactggacgcgagcgcggggcgggtggagagcgtctctccgggcgccgctgctgttgtcccgggtgctgaaaagccgggaacttcccgggaagcagcggcacttttctccctggaaggctaaacatatttttgactggtatgaacccattctactttcatgcagtaaatataattttacactgcttagtgactcttgtgctgatgtacacctgtgataaaactgtcttcaagaatcgtggacttgcttttgtaacggcattgctttttgctgtacatcctattcatactgaggcggtggctgggatcgttggcagagcggacgtgttagcgtgtctgctgtttctattggcctttctctcgtacaacaggagtctggatcagggctgtgttgggggaagtttcccttccacggtgtctcccttcttcttgctgctcagtttgtttctggggacctgtgcgatgctggtgaaagagacaggcatcacggtgtttggagtgtgcttggtttatgacctcttttccctttccaacaagcaagacaagtcgagcaatggggccctctgtccacgcagcccacagcagcccgggagcccccagccctcctcactgccaggccatcctcaccgggagaatgggaagcagcagcggttccctcacaaaggagcttggggtggctgccactctccactgccaccagaacccaagagcagtggattcccagtgtccccacgagctgtgtggtccatgatgagattcctcacctattcctacctcttggccttcaatgtgtggcttctgcttgcacccgtgaccctgtgctatgactggcaggtcggcagtattcctctggtagagaccatatgggacatgcggaacttagccaccatctttctggcggttgtgatggccttattgagcctgcactgcttagcagcctttaagagactggagcacaaggaggttttagtcggcttgttgttcctggtgttcccgttcattccagccagcaacctcttcttcagggtgggttttgtggtggcggagagagtcctttacatgcctagcatgggctactgcatcctttttgtgcatggactgagcaagctctgcacttggctgaatcgatgtggggccaccaccctgattgtgtccactgtgttgctgctgttgcttttctcttggaaaactgtgaaacagaatgaaatttggctgtcaagagagtccctattcaggtctggagttcaaactctgccccacaatgccaaggttcactacaactatgccaatttcctgaaggaccaaggtcggaacaaggaagcgatctaccactacagaacagctctcaagttgtatccacgccatgcaagtgcgctcaacaaccttggaacactgacgagagacacagcagaggcaaagatgtactatcagagggctctccagctccatccacagcataaccgggctcttttcaatctggggaatctcctcaagtcccaggagaaaaaggaagaagctatcaccttactgaaggattccatcaaatatggtccagagtttgcagatgcatattcaagcttagcttcgttattggctgagcaggagcggtttaaagaagctgaagaaatataccaaactggaataaagaactgtccagacagctcagatttacacaacaactatggggttttcttagttgatactggcttaccagaaaaggcagtggcccattaccagcaggccatcaaacttagccccagtcatcacgtggccatggtgaacttgggaagactctacaggtcactgggagagaacagcatggctgaagaatggtacaagcgcgccctgcaggtggcacacaaagctgagatattgtcacctttgggagcactgtattacaacactggccgatacgaagaggctttgcagatttaccaggaagctgcagcacttcagccttctcagagggagctccgcttggcactggctcaggttttggccgtgatgggtcagacaaaagaagctgaaaagatgaccaatcacattgtgtcagaggagaccggatgccttgaatgctatcgcctcttgtcagccatctatagcaagcaggagaaccacgacaaggcacttgatgctatagacaaggctctccagctgaaaccaaaggacccaaaagtcatttctgaactttttttcacaaaaggaaaccaattaagagagcagaaccttctcgacaaagcttttgagagctatagagtggctgtgcaactaaacccagaccaagcacaggcctggatgaacatgggtggcatccaacacatcaagggaaaatatgtgtctgcaagagcttattatgagagagccttacagctggttccagacagcaaactgctgaaggaaaatcttgccaaattggatcgcctagaaaaacgattacaagaagttcgagaaaaggatcaaacatagcaccaccgtctgacccaacctcataggataatgtggtgcctctgaaaggggagtgatggaagccttgctttcacatcagcaggggcacaactaatgagattttctctcattccgagttcagggtgacacattttgggacatctgctggtagcccagtgctgaaggacttgcttttccatgaagaagacgaaaacagcaaacaagggcaagaaggtctgagagggaaggagaatgacatttacacattttacagatttttgtttggtttaactccagatttctcttgatatatctctgtgcttttgagacctggagatctaattctgtttagacattttttgtcccagaaatacagaagcttgaaatgctatgaaggcagagcttctattctttatgggatgaaatatttcaaaagaggataaatcctctgtggtaagccatttggaaaatcctaccaagaattggcttatttaattttccagaaccaggaatgagtatctaatagcttttgtagaaccttccagaatatgtggggaaaaagggctattgctaagtgagctttatctaatatcctcctaagagttttactagtgcttttttgaggaattacagggaagctcctggaattgtacatggatatctttatccctagggggaaatcaaggagctgggcacccctaattctttatggaagtgtttaaaactattttaattttattacaagtattactagagtggtggttctactctaagatttcaaaagtgcatttaaaatcatacatgttcccgcctgcaaatatattgttattttggtggagaaaaaaatagtatattctacataaaaaattaaagatattaactaagagaaatgtcctactttattatcttaatgttcagacatcatgagatttattatttttttgaaaaatatattgaaccattgaggaacctttatgatgtatcacagaaatcttcatagattctaactagatggaaaaagagctctatttatttgtgttcctaggcttaatgagaattctgggcttagaacatcaacgattaatacccagaattctttgttttgagaatattatggagaatgctctaaaaatctagggtaaagatctaaattcaaattttaaatatatatttatatttaagaaataggaaaggcaaagttgaactcacaatttgacatttatttttagtgttatttatttcataacttataaaatatttaatatatacatacacactcttcttttttctctgtacaaagtggttttaatatcagctttcaaaactgatcttataaaatgtaaatctaaattgtaaaatagttaagttttaacagtccctcccaaactttgtgttgattattcacttgctaaagagatgtgaggaatcagccttcagttttttggcagtagtatattttggaagtgaagaaattggaacacctgtttctaatttggtcttcatcattagagacaaaaccaaaacactccaggcagtactgtttatagtgctgagccaggtagcacacagacatagtagcctaaaggctcacataattcgcatgctcaggccagggcagggtaaaaatagccttctgcttctttcaacccagtatcaggaagcactaccccagtgttattatttgttttgtcaaggtaagtctaaataaacaagaaaaacttcttcggaaggcatggcgaagggagtattttaaatgaaaatgattacagaatttgaattagcatgcatctctttgtgtgcaacagtaatccaagaatgtatatgttaccactacaaccatttgtttctaatagttttttcatgttatataacataaatgtatccacaaccttaattaagaactattcttcccccaaaatcatagtcctagtgtcaagaaacatactccagtgtttattgtaaaataacaaccacaccctcaaattgaaaaaagtgaatgtctaggactttattacaacttttcagaataatctgtaatgaaaactcatgcttaaaaatttaatggaaaagactgagccccaaattttgaatagtgattacgccttacttgaagtgctaataaaggtaggagagtacatttgttggaataacagaaatggtgatttcagcctaaaagtttctgagggtaaaggatcacatgaccttcaggaaactctctgcctcctgtaggtgctttcctatctcccccatccttccctaccccttttcccttttccttcctctctttttctctcactgtcactctgtctacacacactggcatcttttgaacactaaaagtaagcactgttttttaaaaaagtaattatttgttggatcagatacttttatcccaagtgaataccttcactgagatgtggccaatgcaatagtttcacagtaaaaacagtgcctataagaaaatagatcacatactatttttcaatgatattaagtgtattttgtaactattttcatttggtccttgtaacatgaaataatacatggaacttacctttataataaaaatggagtgccctggttcatcatagaggtgcatctagtttgcccttaatggaagtatacttgctgtgtggattgatagcaccttcttgaaatggaggagctcagctggcctcatggatgtgcaatttttgcagtcccacagggccttgcatacagaagcaccccgagctcagttgaatgtctgtttgattttttcttatttatttttttgagacacagttccactttgtctttttgtcacccaggatggagttcagtggcacaaacatggctcactgtagcctcgacctccctggctgaagggatcctcccacctcagcctcccaagtaaccgagactacaggcatatgccagcatgtccagctaatttttgtattttttgtagagacagggtttcaccatgttgcccaggctggtctcaaactcctgggctcaagcgatctgcccacctctgcctcccaaagtgctgggattaaaggcataagccaccatgtccaactgaaattcttaataattaataatttttgagcaagaggtccacactttcattttgcactgggttcccaaacaggtcctgggtaggaaggatggctgaggataaaacaggagttgctttggcctggctgaacatttgaaccaatgatcagagtttcattttatgattgtgttactctgaacagatttgctatttttttccagctacatttagagttcctcatgtatatatcacccctctttttccagtccatctaacctctccttttttttgtgcctagaatcagttctccttgccttcaaaatccctgataagtgtccatttctttttgtatcctttgatgtagaagccacaagaatggctttagcagcttattttaatcttatgaattattcattcaggattttttaaatgattcagatgctttcaatctgttaacagtatttataaaacatgtttcagtgatacaacataggtgaactaaaccaaagatgcaaatgccttggaggaaaagaaattgtattatagagaatcctgagatatatccttttgggttgtttaatttaaagcctatcacaaaacaaagagaattgtcgcactttaattccaacctcctgcagtacttcacaacccttagcataagattctgaaatttgtaataggtggtacctagtttgatgcagggttttgcagcagttgtgcgaatgcctctgcgcaacggcctttcagtcagactaaatgagaaaatccaaactgtcctatcaaaactgacccacaataactgtactctgaggcgaaacagagcaaatgtgggtttcctgttttcattgtaaaacattccaggttctcagattgaagagctacattcagctgatagttgacatctgttccctcacacgtagtggctctcaacacgggctgcactttggaatcacctgaggacctttcggaatcttcggttgaatcatcctggctgtcctggtgatgcttcttatgtgcagctaggctggagaaccactacagggctgacacctggaatgggagcttgtaacttttacaaaataatagatgtttatcatcttttgcaatttttacttttaagtctatactaaaatgagccaaagaagtcttaacaatgatgtatggcacaattggttggttgaggctatcattccatgattacaaataggtggttatgtggggtggttttgcacttgtggcaattggactgcaatttggccttaaaatgacacaattcctcgttctcagatggagaggaattgccttgaaatttgcatgtaccagactaagtgccagtatatatatgactgatattttcgtgactcatagaaggtgtccatggtatagagtttatgcctacatctctatctttattttgggcacacatgagcttttgttaattatttctttgtacttgttagaatctgtttttgaaaaaaaaaaaaacttttgctttgatttgtggtggattcaccttcttaaaataataaatttagaggatattaggaatgacattcaaaacaaatatagtgagaggtgattttttaaaaatttttgttcctggtttccaaattatgtttactttgatttgattatatgttggtatctcccaaatataggttaacttagctatttaaatggtatcttttgacatttaaaaagaattaagtacctgtcaaatctagcattgaggttgcagttgaataagataaaagcttaggatgtcaaaaaataatatagagaaatattataagattttatgattattcttgacgtttttgatgcaaaaggaaaatatgctgaatagttcttccaaaaaatattatttccctcaatattttatttgtagccatgtaatttaaagagaacagaaaataactgcaatcaaaagtatggtttaatatcaatcaaagtggcacaacagaattgataagatctttataacaatcaattggctgatattaaaatattgattttaattgatcttttcaattaaaatctttagggcctgtaactcataaaatcagcatccaccacaatatatggtcattattggtttgtaagcatagatcaccattgactcctacctggagagacatgtctatttctaaaaatccagtagtttctttgcattctcagtagtacacgttgtatatatatatatgtaacaaatttggtagttttcagtatgtgtgatgtcctttgggggttatttatcttgctggtccataggaggggtacactaccccaagaatcaagacatctgagttctagttctagttctagctctgccactgaagagccaccttacctggggcaagttagccattgtctcccagtcatgtttaccacccatgaaaggactcgtcggtttgatgtttccattaagctcaatgagtaactctaatagttactcttgaatctggattgaaaaacaccatgcatctgatgagataattcataaatgttgccccttttttaaatgatacaaccctaaaagtgactgaattgcccaagtgcttgaacatggcagaggtagttactcctattttgcagtttgtgcacttaaaaattcctacagtgattgttactttactggggaaaaaagatgaggtgaaacttcctcccaaggaattaaaatatctgtagaagccatggcttgcttttataatgtggaaatcatttgatttgctgtaattcacgcagatccctccttttgtcagggggaaatgatttgcatcatgttcttttttcataatgcttttacttcctgtttggatcagttgtatgtaaatgtacatttttgttactttggctgtgcccgttagaatttatcttccataaagtatttctcccattgagtctaatgatgtatactttgcctaggtctttccaaaattaaatttatgtaaatgtctattttatataaaatatgattaaaataagtatgtctggtttcaatctctcaagtaaaaaaaaaa

SEQ ID NO: 6668 - DNA, 2784 bp, Homo Sapiens
  NM_175862
ggaaggcttgcacagggtgaaagctttgcttctctgctgctgtaacagggactagcacagacacacggatgagtggggtcatttccagatattaggtcacagcagaagcagccaaaatggatccccagtgcactatgggactgagtaacattctctttgtgatggccttcctgctctctggtgctgctcctctgaagattcaagcttatttcaatgagactgcagacctgccatgccaatttgcaaactctcaaaaccaaagcctgagtgagctagtagtattttggcaggaccaggaaaacttggttctgaatgaggtatacttaggcaaagagaaatttgacagtgttcattccaagtatatgggccgcacaagttttgattcggacagttggaccctgagacttcacaatcttcagatcaaggacaagggcttgtatcaatgtatcatccatcacaaaaagcccacaggaatgattcgcatccaccagatgaattctgaactgtcagtgcttgctaacttcagtcaacctgaaatagtaccaatttctaatataacagaaaatgtgtacataaatttgacctgctcatctatacacggttacccagaacctaagaagatgagtgttttgctaagaaccaagaattcaactatcgagtatgatggtgttatgcagaaatctcaagataatgtcacagaactgtacgacgtttccatcagcttgtctgtttcattccctgatgttacgagcaatatgaccatcttctgtattctggaaactgacaagacgcggcttttatcttcacctttctctatagagcttgaggaccctcagcctcccccagaccacattccttggattacagctgtacttccaacagttattatatgtgtgatggttttctgtctaattctatggaaatggaagaagaagaagcggcctcgcaactcttataaatgtggaaccaacacaatggagagggaagagagtgaacagaccaagaaaagagaaaaaatccatatacctgaaagatctgatgaagcccagcgtgtttttaaaagttcgaagacatcttcatgcgacaaaagtgatacatgtttttaattaaagagtaaagcccatacaagtattcattttttctaccctttcctttgtaagttcctgggcaacctttttgatttcttccagaaggcaaaaagacattaccatgagtaataagggggctccaggactccctctaagtggaatagcctccctgtaactccagctctgctccgtatgccaagaggagactttaattctcttactgcttcttttcacttcagagcacacttatgggccaagcccagcttaatggctcatgacctggaaataaaatttaggaccaatacctcctccagatcagattcttctcttaatttcatagattgtgttttttttttaaatagacctctcaatttctggaaaactgccttttatctgcccagaattctaagctggtgccccactgaattttgtgtgtacctgtgactaaacaactacctcctcagtctgggtgggacttatgtatttatgaccttatagtgttaatatcttgaaacatagagatctatgtactgtaatagtgtgattactatgctctagagaaaagtctacccctgctaaggagttctcatccctctgtcagggtcagtaaggaaaacggtggcctagggtacaggcaacaatgagcagaccaacctaaatttggggaaattaggagaggcagagatagaacctggagccacttctatctgggctgttgctaatattgaggaggcttgccccacccaacaagccatagtggagagaactgaataaacaggaaaatgccagagcttgtgaaccctgtttctcttgaagaactgactagtgagatggcctggggaagctgtgaaagaaccaaaagagatcacaatactcaaaagagagagagagagaaaaaagagagatcttgatccacagaaatacatgaaatgtctggtctgtccaccccatcaacaagtcttgaaacaagcaacagatggatagtctgtccaaatggacataagacagacagcagtttccctggtggtcagggaggggttttggtgatacccaagttattgggatgtcatcttcctggaagcagagctggggagggagagccatcaccttgataatgggatgaatggaaggaggcttaggactttccactcctggctgagagaggaagagctgcaacggaattaggaagaccaagacacagatcacccggggcttacttagcctacagatgtcctacgggaacgtgggctggcccagcatagggctagcaaatttgagttggatgattgtttttgctcaaggcaaccagaggaaacttgcatacagagacagatatactgggagaaatgactttgaaaacctggctctaaggtgggatcactaagggatggggcagtctctgcccaaacataaagagaactctggggagcctgagccacaaaaatgttcctttattttatgtaaaccctcaagggttatagactgccatgctagacaagcttgtccatgtaatattcccatgtttttaccctgcccctgccttgattagactcctagcacctggctagtttctaacatgttttgtgcagcacagtttttaataaatgcttgttacattcaaaaaaaaaaaaaaaaaaaaaaaaaaaaaaaaaaaaaaaaaaaaaaaaaaaaaaaaaaaaaaaaaaaaaaaaaaaaa

SEQ ID NO: 6669 - DNA, 1022 bp, Homo Sapiens
  NM_175870
ctcagtgctttcttttctgtcctcctccaggatggggtcaaccgtcatcctttccctcgtcctggctgttctccaaggtgtctttgccgaggtgcagctgttgcagtctgcagcagaggtgaaaagacccggggagtctctgaggatctcctgtaagacttctggatacagctttaccagctactggatccactgggtgcgccagatgcccgggaaagaactggagtggatggggagcatctatcctgggaactctgataccagatacagcccatccttccaaggccacgtcaccatctcagccgacagctccagcagcaccgcctacctgcagtggagcagcctgaaggcctcggacgccgccatgtattattgtgtgagagggaccatctaaaaccttccgcggtgcaggtgcagagtgagctgccagacacaccctccccaggggcctctctattcatccggggaggaaacactggctgtttgtgtcctcaggagcaaaaaccagagaacaacatgggagcgttcctaacccctaaggcaactggatgggagacctgacccatccagttctctgagggggctcttgtgtgttctacaaggttgttcatggtgtatattacatggttaacatcaaaaggctgcctaataggcacctcttcaatataatagtcttttaattagtgaaaattttacacagttcatcattgcttgcttgccttcctcccttctgtccgctcttactccctccttcttttattttctacttacttttccaaaatcatttaacccctttttgtaccattaataagttatcttgtttttgttgttgttttccttttaacaatatgcactgaataattcatctttgtgccaattcgtaaatattttgatataacaaagacttctgtcataaatagatttcctgtgagtaatcttgcaaatattttagaacctgtttggttaagaataaattaaaataaatagacaaatttttaaaaaaaaaaaaaaaaaaaaaaaaa

SEQ ID NO: 6670 - DNA, 1662 bp, Homo Sapiens
  NM_175871
aaccaggggcggtgcggcctggtccggggaggagaacatgcctgccgccggaccgcctttgctgctgctcggtacaccaggatctggaaaaacagcgctgctatttgctgcggccctagaggcggcgggggagggccaaggcccagtcctcttcctgacacgaaggcctcttcaaagcatgccccgcgggaccggaacgactctagacccaatgcgactccagaagatccgcttccagtacccaccctcaacccgagagcttttccggctcctgtgctctgcccatgaggccccggggccagccccctcccttctgctgctcgacggcctagaagagtacctagcggaagacccagagccccaggaagccgcctacctcattgccttacttctagacacagctgcccacttcagccaccggcttgggcctggccgggattgtgggctcatggtggccctccagacccaggaggaagcaggtagtggggacgtcctgcacctggcactgctccagcggtattttcctgcccagtgctggctgcagccagatgcaccaggtccaggagagcacggcctccgagcctgcctggagccaggcgggctgggccccagaacagagtggtgggtgactttccgatcagatggagaaatgatgatcgctccgtggcccacccaggctggtgaccccagctcaggcaagggttcaagctctggaggccagccctgagctttggtgggtgactacctctctgtgcttcagtttcccatggctggaatacttacctcagggacatatgcagatccaaagacctaaacaatgtaaagtgctttttctcttttaaaagtatagcattatcttgtatatattttacccaatcaatatgttgtttatagtttcattgctttaaactttataaaaagagcttcaggccaggcgtggtggctcacgcctgtaatcccagcactttgggaggctgaggcggtcagatcaccagaggtcaggagttggagaccagcctgcccaacatgatgaaaccctgtatcaactaaaagtacaaaaaaaattagctgggtgtggtggcaggtgcctgtagtctcagctactcaggaggcttaggcaggagaattgcttgaacccaggaagcggaggttgcagtgagccgagattgtgccactacactccagcctgggtgacaaagcgagactccatctcaaaaaaaaaaaaaaaaaaaagtttgagacttccttctttttgcactcaacgttgttactaagattcatctacatttttttagttcattcctttttccatattgcatataattccatgggtgactataccctgatttcttcatcagattgccttatttactgctgcgaacattcttgcacacatgccctggtacgtgtgtgtgtttttaggggccgagacaggtggatcacctgaggtcaggagttcgaggtcagcccggcctacatggtgaaaccccgtctctactaaaaatacaaaatttagccaggcatggtggcatgcacttgtactcccagctacttgggaggctgagacaggagaattgcttgaacccgggaggcagaggttgcagtgagctgagatcgagccactgcactccagcctgggtgatgaagacgagactctgtctc

SEQ ID NO: 6671 - DNA, 3898 bp, Homo Sapiens
  NM_175872
cggggaggctgagtccccaggagctggggaccccgagttgggggcggggcggctggggctacgcccgtgaagctgccccgccggctttcccggaccgcgagggggacagtgaggccgggaccccctccgcgcctttgcaccagccgtgaccccttgcaacgggggtacccagcggagctgcgcgctctcggcgcccccggagcctgcgccccgggccccttgcgcattttgcacgggggagactgaggctaggagtgcgaccctcagcccggggtcacacctcgtctggggcacggccaggtgggtggtagcctcagcctgcgagaccccctacccccgccccgtggtttcccgcaccgtggggccctgctctgaccacagactccgatggcagcggcggcgctgcgggaccccgcgcagggctgcgtgacctttgaggacgtgaccatttacttctcccaggaggagtgggtgctcctcgatgaggctcagagactcctgtactgcgatgtgatgctggaaaactttgcacttatagcctcgctgggacttatatctttcaggtcccacatcgtttcccagttggagatggggaaagagccctgggtgcctgacagtgtggatatgacatcagccatggccagaggggcttatggcaggcctggctctgatttttgccatggaacagagggcaaggacttaccttctgagcataacgtttctgtagaaggagtggcacaggacaggagtcccgaggcaactctgtgcccccagaagacctgcccctgtgacatatgtggcctacgtttgaaagacattttgcatttggctgaacaccagacaacacatcccaggcagaaaccatttgtgtgtgaggcatatgtgaaaggctctgagttcagtgcaaaccttccccggaaacaggtgcagcagaacgtacacaaccctatcagaacggaggagggccaggcttcccctgtaaagacctgcagagaccacacatcagatcagctttccacctgcagggagggtgggaaggactttgtggccacagcagggtttctgcagtgtgaggtcactcccagcgatggggagccgcacgaggccaccgaaggtgtggtggattttcacattgcactaaggcataacaagtgctgtgaatctggggatgccttcaataacaaatccactcttgttcagcaccagagaatccacagcagagaaaggccttatgaatgcagcaaatgtggaatcttcttcacttacgccgctgacctcactcaacaccagaaagttcacaatagaggaaaaccgtatgagtgctgtgaatgtggaaaattcttcagccagcactccagccttgttaaacatcgcagggttcacaccggtgaaagccctcacgtgtgtggtgactgtgggaaattcttcagccgaagctccaacctcattcagcataagagggttcacactggtgaaaagccatatgagtgcagcgactgtgggaagttcttcagccagcgttccaacctcattcatcataagagggttcatacgggcagaagtgcccatgagtgcagtgaatgtgggaaatctttcaactgcaactccagcctaattaaacattggagagttcacactggagaaagaccttacaagtgtaacgaatgtgggaaattcttcagccacattgccagcctcattcaacatcagatagttcacactggcgagcggcctcacgggtgtggtgagtgtgggaaagccttcagccgaagctctgacctcatgaaacatcagcgagttcacactggtgagcggccttatgaatgcaatgaatgtgggaagttatttagccagagctccagcctcaatagccatcggagacttcacactggtgaacggccttaccagtgcagtgaatgtgggaaattctttaaccaaagctccagcctcaataaccaccggagacttcacaccggcgagcggccttatgagtgcagcgaatgtgggaaaaccttcaggcagaggtccaatctgaggcagcacctgaaagttcacaaaccagacaggccttacgaatgcagcgaatgtgggaaagccttcaaccaaaggcctaccctcattcggcatcagaagattcacatcagagaaaggagcatggagaatgtgctccttccctgttcacagcacacaccagagataagctctgagaacagaccttatcagggcgctgtcaactacaagttgaaacttgttcatccaagtacccaccctggggaggttccctaggaatgctagctgtgttggaagctttctggagacaagttacattctcttactgtagagtttatcagcgttttttcactgctggggttgtgatagaagccatgtcagcaccacacactgcagctctccaaagagtgtgtccaccactccactgtgctcagggaaggcagacctctcctctctctttccaatccctaaagggaattaggagtagtctgaagccttgggaagatgtcattcccgccctgtatggctggtttagccatggacatgaccagcttttggctgtgaagacctgagcagggttttgccaacagcttgttctagagaaggtttccctttttctgggacattgttggtctcatgttatgcctgtgaaggatttgtccagccttcatgttactctacacaacaacttatctcctgtgtattgccctggttcatgtgatgataatggccttatgataaagccgcctttagtcttccatgttctgatcactgtgtggggtggttcaagagcagagttaagatctaccaaactgaaggggtctccagattatcttggaggggacaggaggatggcagagaaacaactgtcaatccagatttgacctcatttgcattgccaccaaggcctcctaggaaaaattgtaggaatttatgggtataatattgtggtctgaatggcgtgaatttttatcccgaggagggggcagttgtgacaacctccagtgcatgtgggaacagcatgaattgggtcccttattcccagggggtgccccatattccccaatactgtaaagcagatgctgtttagcacctgccaaggagccatatgccctgaagttcagcattaggcaggtatctcttaactgtaagacataccaggcccagctgggaccataatttgtacagaaacactggatgtgattaatagggagtaggcgagattatagcaaaccagcagaaatggaactctgctaaatgtgcatccgtgaatgctcccttgaatgtggctgtgcaggattcagggtttgcagaaattctcaggacctcagacctctgtcctatgactaatgttactggcagagcaaataatctaaaggttttggttttgtggattaccatctccgtgctgtgcatctgaaggccagtgctgtgctggcaggaaaatagggactgagaaaaagcagatcctatactatagggactgtagtatctatgacgtagccagccattctttgctcccaaggcaagaagaaagagatgacagagtcaatatagggttgccaaatcggattttctaaaatgagtaggaagttggatttttatgtgcaacagtttcttttaatgctttgttgatatgtgattgtcatgcaataattattcatatttggtaagttttgtacatatattatgtacactcagggaaccaataccataatcatgataatgaacgtatccatcacctgcaaagctacctcatgcccctttacattccctccttgccttccctaggaaaccgttgatttacattttttactttagatttgtttgccttttctagaattaacacaattggaatcataaagtatttatactctcaaaaaaaaaa

SEQ ID NO: 6672 - DNA, 4513 bp, Homo Sapiens
  NM_175902
gattgctcgggcctggccgccagcccaggggccgatggccgagcgcgtcgcactcgcgtccctgcgccgtgcctgcctcgcgctccctgttacggcgttcgtccccgggcctggcgcccgcgtccggcccggctccgcggcggcctggtccgatggctcctcagcggagggccgcaaccaaggcgcccgagggcaacggagcggccgagcgccggaaccggagcagcaccaagaaggaccgagccccgcgggaggtgcagaggctgtggcagaggccgtggctaaggaccgcgggcctgggggctggctttgtgctcaccgcactcctgctctggagcagcttgggggccgacgacggggtcgcagaggtcctggcccgccgtggcgaggtcgtggcagggagattcatcgaggtgccctgctctgaggactacgacagtcaccgcaggttcgaaggctgcactccccgaaagtgcggcagaggtgtcaccgatgtcgtcatcaccagggaggaagcggagcggattcgcagcgtagctgaaaaggggctctccctgggaggatctgacggaggggcatccattctggacttgcactcaggggccctgtctgtcgggaagcactttgtgaacctgtacagatacttcggggataaaatacagaacatcttctcagaggaggacttccggttataccgggaggtgcggcagaaggtccagctcaccattgctgaggcttttggcatcagcgcatcctcgctgcatctgaccaagcccaccttcttctcccgcataaacagcacggaagcgcggacggcgcacgacgagtactggcatgcgcacgtggacaaggtgacctacggctccttcgactacacctcgctgctgtacctctccaactacctggaggacttcggcggagggcggttcatgttcatggaggagggtgccaacaagacggtggagccgagagctggatgtttttgtttccggatgatgtcttgtgggttccaagaagttaatggaccgagagccagtgaagctgctggtgcgaaggctggagtcaggtgtcctccggggactcaccacccgcccgagaggggagagacacatgcgattctggaagctgagagcattgcttattgttgattccttggttgccgtgctgagtcctgctttaaggaagcaggtcgcgtctccttcttcacctcggggtccgagaacctacaccgcgtggagaaggtccactggggcacccgttacgccatcaccatcgccttcagctgcaaccccgaccatggcatcgaggacccagcgttcccgtagccagcagccgggccaaggtaacttcaggagggcccgtgtggaggcagccgcgccagtcgtgcacccacccccacgtccacccgctcctgttgcacagagtgccttaggaattctctgattttgatttgctgacgtgttaatcttttcatctgtgagtaaatgaagggaaccagcttttcacttctccagcatcatgtgtgcttgggctgtaggcctgggagcctgaggtggaggccaggaaagggacccagcaggacggggcacaagtccccatctgtgaatggacgggactcatccacccaggttcagcaaccccccgggactcgtccaggttcagcaaccccccggcccatcaaagactggctaaagcatcagccataaatggggacaaacgtggggccagcagcttctgttcggggtctcggcatcagcaaaccgcagcagctttggagaagggtccgtgagtggcggctctggaggcagcaacggggtcctttggggtgggtgggagttctgctggattcaggtggaggtgaacatctgccgttcccacagccctgcgtgcacccccaatgctgctggcccacaaatcaccgtgggccacggccccaccacaccaggcttggccctgtcagcggccagcatcccaagggccagggtccgagtgtcctcaccaaggaggctcttggcgtcgctgtgccggctcccatgggccttctgctgggtcgagggtaggtctcctcctccccctttgccctggcattaaactgatggtcaggctgggcgcggtggctcacacctgtaatctcagcactgcgggaggccgaggcaggaggatcacttgaggtcaggagttcaagaccagcctggccaacatggcgaaaccctgtctctactaaaaacacaaaaacaaattaatcccagctactggggaggctgaggcaggagaatcgcttgaacccagggggcagaagttgcagtgagccgagatcgtgccactacactccagcctgggtgacagagtgagactccatcttaaaaatataaaaataaagtggtggtcagaggagccccgaatagaccagttgtggagaggcctgggtggggtggctggcagggagggcaggccaagcccagtttctgcccacagtcacctcgaggtgactgtccagggctttgggcaccttcccgggagggggacggccgcccaccctgagtggtgttggaagctgggctctcctggatgccctgacccagctgcctggggagagccctgggcccctcctccctcagcacctcctccctcagcccctcctgcctcggtccctcctcccttagcctgtctggcatagatccatgttccctagcccctggcacaggtgcctctgactggaggaggccccacctgtggcccgggagctgctctgggggttgataaagggcagcattattgggtcctgggaaggagcgggcgtgaggccagctgaggcatggtgacccctgggaaggagcgggcgtgaggccagctgaggcatggtgacccctgggaaggagcgggcgtgaggccagctgaggcatggtgacccctgggaaggagcgggcgtgaggccagctgaggcatggtgacccctgggaaggagcgggcgtgaggccagctgaggcatggtgacccctgggtacgggggacttgggggccgcaccttggtttgcccagggcccctcctgcaccacgggccacatgcggaggacggcgtgggataggctccctgggtccacagcttctgcccgtgtatggggaaccctccttggtcagggctgcaggctctgggcagatggggcaggaaccctgaggctcccgcgccctcccatggcctctgatgtgggacactggagcgaggcacgattctgaaggactccatggatctgggaggatgaggcccacctccggttggtggccaaagccgtccttgcggggccggctgcttcacggacactctccgggtcgggctggtgggccccatcgtgggtgggaagtcgcctgagcctgggccgcccttgagcttctcccagtcttgactttccagagggtccgtggctgtggtcatggtcggggcaggtggaaaatgctgcatggaaacctgatcctgtcaccttggagtaaatgatgatgtcgccggcttctcgccacgtctaaaggataaatgcatttgaagaaagtgggtgttgggtttgttatgggttaaagtgcttttgaaataagtaaattattagtttgattttcattcttggctacttacactattcatgataatcacagagatacttggacaaagaaatatatttgggcaaaagcaagaatttccttctttttttttttgagacggagtctaactctgtcgcccaggctggagtgcagtggcgcaatctcggctcactgcaaggtccacctcctgggttcccaccattctcctgcctcaacctcccgagtagctgggactacaggcgcccgccaccatgcccggctaattttttttgtatttttagtagagatgggatttcaccgtgttagccagaatgaagaatttccttctgaagtgggaacatatggctcatgctggtaatcccagcactttgggaggccaaggtaggaagatcacttgagcccaggagttggagacccatctgtgcaacatagtgagacgctgtctgtacaagaaacttttaaaaaatgtagctgggcgtggcagtgtgctcctgtggtcccagctactcggagctgaggcaggacgactgcttgagcccaggaggtcgaggctacagtgagctgtgacggctccactgcattccagcctgggagacagcaagatactgtctcaaaaaaaaatttatcattgaagcctgggcattttaaaaaaataaaaaggtgggaaaatacgtgggcacagcagtgaatcctcacaccctgggctttgcccaagaagtgctcgtgaacctgatgaaagtgtcgggtgtggccgacgtgaggctgttccaggagccacgaggggtgattggttccgctagaaggttccagggaggaactggagtctcaggtgtgtcctctgatgagtgatctatttttaagtaaaagtgtttcattaaagtcaaagatgattattcctttcaaaataaagaatctaggagggcga

SEQ ID NO: 6673 - DNA, 5495 bp, Homo Sapiens
  NM_175907
aaaggagcagcggccggggcggcagcggtccccaggccgggacacccggggtggtgcgcccgggttcgcgggggctgcgccggcgccggggaggcggggggagcgggagcgggcgacgcggggaaggggggagccagggggagggcgccggccggaggaggggcggacccgcccgccctagccgagcagagcacagccgagccgagcggcccgggcgggggccgaccccggccagcgtcggcgcagagagcgggcggaggcgcaggccatgctgcggctggtgcccaccggggcccgggccatcgtggacatgtcgtacgcccgccacttcctggacttccagggctccgccattccccaagccatgcagaagctggtggtgacccggctgagccccaacttccgcgaggccgtcaccctgagccgggactgcccggtgccgctccccggggacggagacctcctcgtccggaaccgatttgttggtgttaacgcatctgacatcaactattcagcaggccgctatgacccctcagttaagcctccctttgacataggtttcgaaggcattggggaggtggtggccctaggcctctctgctagtgccagatacacagttggccaagctgtggcttacatggcacctggttcttttgctgagtacacagttgtgcctgccagcattgcaactccagtgccctcagtgaaacccgagtatcttaccctgctggtaagtggcaccaccgcatacatcagcctgaaagagctcggaggactgtcggaagggaaaaaagttttggtgacagcagcagctgggggaacgggccagtttgccatgcagctttcaaagaaggcaaagtgccatgtaattggaacctgctcttctgatgaaaagtctgcttttctgaaatctcttggctgtgatcgtcctatcaactataaaactgaacccgtaggtaccgtccttaagcaggagtaccctgaaggtgtcgatgtggtctatgaatctgttgggggagccatgtttgacttggctgtagacgccctggctacgaaagggcgcttgatagtaatagggtttatctctggctaccaaactcctactggcctttcgcctgtgaaagcaggaacattgccagccaaactgctcaagaaatctgccagcgtacagggcttcttcctgaaccattacctttctaagtatcaagcagccatgagccacttgctcgagatgtgtgtgagcggagacctggtttgtgaggtggaccttggagatctgtctccagagggcaggtttactggcctggagtccatattccgtgctgtcaattatatgtacatgggaaaaaacactggaaaaattgtagttgaattacctcactctgtcaacagtaagctgtaaaaacagaacaatgacataaatcaagggagaaagaaaatgggcactttatgtctcagaattactcaaatcaatttatttttagttggtaatggatataatatttcttaaaacaaaagtaaggtgttaatgaataggtctctccttctcctcctcctcctcctcttcccttgggggaaaaaaaaaaatgtgctaataaaacttccctccatggctaagagggaaaacgcttacattcaattctttagtcatggatggtctcgttccagatgttattgttccagggaactaaattcattcctgatgccagatctgatcgagtcagtatgtcttcagcttgatcagattttaaaatcagttttgaaagtggttcccgacttctttgctttgggagaatttggtcttatgctcataagcagttcatgagtgacaagtgtagcaaaagccagccatatattttcagaatctatatcctcaggaaatggtcctttttttttctataaatcaccaaccaactatctaaatggacatttgggggaattccctcccaaatttgattttgttattagaaaaatgattccgtgaacacagatgtgttttgaagaagtagcacgtaatggcttttatctaccatcaacctgataaggcacatgtgaaatggaaatgttctctttcctctgaagcagcaaattaatgttgaaaacttacatagacagaaagtaggttttggaaagggaaaccacagagattagggggacttaaaattaatataggcacaggaaagagaaaagtgtgcgctccattctcagtgggggttcaccacaaaacacgggccccaggagggaagcgctgtctaggcacacggcaaggccttagtaacagcatgctacactgctcgaggtacggtatgtcccatcgccctgtgcaccgtagagacctcagtcatctcaaggaagaatacatttgcttctccttagaggcgttcgaactagaagctatgcgttacctctgattctggaaacagaatagcagccactcattctgcattcccatttttctctccacgtgttctggtggaatgagatgctccttggcactatagcctgatgtcccacattgacccactgaccacacaggaaaagcagcgaaacctgcaccctctcttctgagtcacgcctgtggctcatcggcttccctcttaacctttagtgccctgaagactgctgccgctgtcaccgttgcgctgaaaccccatgggcccgttctgattgaaggtgaagcccaccagattatttttcaaagtcttaggtttcggtgtatctaacctgctcagtaaatatggacgcaattaaagatgctctaggaaatttggggactgtatttaatttttctttccttccatctgaggagcaaggaaatcctactgctgaatagctgttagtatctattttacaagatttactcattttcaggtacctaatgtagctgctagcatgcatgcacaacaatacaatttatatggtaaatggaaccaaataatggcttcactgaatgttatggctgcactgaagggaaatgtcacggtaaatagctgccaaattatggatcatgccgaagtgtcacaactgcactaaagacaaatagcactagaggctattgccactgtgacgcttttgagttatgaagaagggtagcggcctgatgcgaggctctttgtgtcctcattatagcaaagggttactggtgcaggggactaggaaaaacccgtccagtgtggtgcttagttattcatccatccctttcagacctaacagccacagccacacggaaagagactttgcctcacttttacattcacaaacaaacaaaggaggggggagcaggttttatgaatgtaactgtgcacaggaaatgactggtaatggaaaaaatgttgtaataaaataatctaatcaaagaatattattaaatttaacatagtctatgtccaaaaggcttagttgcttcttatgcagatagatgtgtgaaatctaagcagtaatgtactttctccctttgtaaagacttggggagtaaggacattaccaactaaattgcttcttcgaaactgaagtgagtcccggtttgtttcattttaatgggagggtaataaagatgaaagaccaacattttaactgatggatcccttaagctacagaatagaaatttattgtgttttgagggaatatactaaatgcagctatgtaaaaataaaattcaaacgcccaggattaaaataaaatataatctgaaaacctcatgttctctctttccccaaactaagaaagtgcactgcatgctgttttcacttattcttagaaaacaagcatgaaagattccgcccattcagataatgccaaaaatatgtttaaacttttttttattcttttgaaaaatgatttgtaaattgagggtcatagttcagcatcagtttcatcttctgggattattgttcaagaccagcctctaatgggaggtgaaacggtacgatggtctcaacacctttcttctgaactgtaatacatatcacaaaaagtacatccataattcagggcaattgtcagtctttttagagaaggggccagggtggaacaatcccagtgagtaaattatttctcagcgtggacttctctgcatgtcgggcttaaggtcaccagccgggcagggtggaaggagcttgcctctttgagaaaccaaggagtcccagtgatctgttaccatttggttatgacttctaaagagccaaatgctattccttcaagcctgttttgcaggcagaaaataccagcagtgtcatttaggggttcctttgatgatgactactgctgttaactgacctcagcattaaaaaaaaaaaaattcagggaatagtttgcaaagaaatgaaggaagttttgcatgatatattctataacttgtcattatatgatttcatctggatgaagttcctcaggagtaggatagagcctctgtaaatggtcattagtattacattctgtgtttatctaatgaaagtgcagtgacaagtagctgcttcttattaaaatgaaaatcctgcattatgtacttgaggaacattccagctaatgaggatgtaatgtcctcagtacaacgcagaccttctttttgtgttcaccaccacaagatgctggaagcttgacaaatgatatcatttaagacacatgcctgccttagggacctggtttttggcttcctgtttctggcttttatttgggtaacgtttataatggccacccgacttgtacctgggtaatgttttaaccccttccccagagttctcaattagcatgaatttactacagtcagagtttcctttaaattggggtgggggtgctaagcactgaaaatatctttcttgattactttaccatgtggacatatgggataaatactgtatttcagatttacataaaagtagattagtaatgcacagctttcagaataaaaactgataaaaaagaccaagcactatcaactttggacagtaatttcctaggtgttaaacaagttttctgaatacaatctggatgcaaaacggcctgatttgatgaattcataattttcttctgtatactttcattttattaaatattttattacttggttaaacacaagaattatctatgtaaacttcatgggcttttttgttgaaagttagatgttcagtaactaatttcccagttatggcccagaattaaacatttatgatcatatttcagaagtcaaaatacaaaactggattatcaaaacggttggtgtggtcactttaaactggactatcagtatggttgccgtggtcactttaagcgggattatcagtacggttggtgtggtcactttggtttatcatcaatacagttggtgtggtcactttaaactggattaccaatatggttggtgtggtcgctttaaagtttgttttcattttttttctatttttaattcttacgggtatatagaaggtgtatatatttatggggtacatgagatgtcttgaaacaggcatgcaatgtgaaataaataagcacatcatgga

SEQ ID NO: 6674 - DNA, 4262 bp, Homo Sapiens
  NM_175920
ctcctaactccactaagtacagaagtggagccgtacagccatgaatgtcaggcatgttgtggggactagttgtattagttttctattgccaccataacaaattaccacaaacttaagcaatatagtacaaatttatcttaaagttattggcaggtcagaagcctgatacggatctcattgggctaaaacgaaggagttggcagggctgtgtgttcctttctgtaggctctgggcaggatccatttcctgcacttttttggcttttggaggtcgtccacattccttggctcctggccctgctccttcatcttcaaagctaccaaagatcggcttcagctccccaggaatatgattgaaaacagcatgtttgaggaagaaccagatgtggtggatttagccaaagagccttgtttacatcctctagagcctgatgaggtggaatatgagccccggggttcccgactgctggtgcggggtcttggtgagcatgagatggaggaggatgaagaggattatgagtcatcagcaaagctgctgggcatgtccttcatgaatagaagctcaggccttcggaacagtgcaactggttacaggcagagcccagatggggcttgttcagtaccctctgcaaggaccatggtggtctgtgcttttgtcatcgtggttgctgtttctgtaatcatggtgatttacttactgcccagatgtacctttaccaaagaaggctgccataaaaaaaaccagtcaattggactaattcagccatttgcaacaaatgggaaattgtttccatgggcacagatcaggcttcccactgccgttgtgccactacgctatgaactcagcctacacccgaacctaacctcgatgacattcaggggttctgtgacaatttcagttcaggctcttcaggtcacatggaatatcattcttcatagcacaggtcataatatttcaagagtgacctttatgtcagcagtttcaagccaagaaaaacaagctgagatcctggaatatgcatatcatggacagatcgccattgttgcccccgaagcccttctagcagggcacaattatacgttgaagatagagtactcggcaaatatatctagttcttattatgggttttatggcttctcctacacagatgaaagtaatgagaaaaagtactttgcagcaactcagtttgaacccctggcagcaagatctgcttttccttgttttgatgaaccagcatttaaagccacttttatcatcaagatcataagggatgagcaatacaccgctttatcaaatatgcctaagaagtcatcagtcgttctagatgatggacttgttcaggatgagttttctgagagtgtgaagatgagcacttacttggttgctttcattgtgggagagatgaagaacctgagtcaggacgtaaatggaaccctggtttctatatatgctgtaccagaaaagattggtcaagttcattatgccttggaaacaactgtgaagcttcttgagttttttcaaaactactttgaaattcagtacccacttaagaaattggatttggtggctattcctgactttgaagcaggagcaatggaaaattggggtttgctcaccttccgagaggagacacttctgtatgacagtaacacttcttcaatggcggatagaaagctggtgactaaaatcattgctcatgagctggcccaccagtggtttggcaatctggtaacaatgaagtggtggaatgacctatggctaaatgaaggttttgccactttcatggagtatttctctttggaaaaaatattcaaagagctttctagttatgaagatttcttagatgctcgatttaaaaccatgaagaaagattccttaaattcatctcatccaatatcatcatctgttcagtcttcagaacaaattgaagaaatgtttgattctctttcctattttaagggatcttctctcttgttgatgttgaaaacttaccttagtgaagatgtgtttcaacatgctgttgtcctttacctgcataatcacagctatgcatctattcaaagtgatgatctgtgggatagttttaatgaggtcacaaaccaaacactagatgtaaagagaatgatgaaaacctggaccctgcagaaaggatttcctttagtgactgttcaaaagaaaggaaaggaactttttatacaacaagagagattctttttaaatatgaagcctgaaattcagccttcagatacaagctacctgtggcatattccactatcctatgtcactgaaggaagaaattattcaaaatatcaatcggtatcattactggataagaaatcaggtgtcatcaatcttacagaagaagtgctgtgggtcaaagtgaatataaacatgaatggttattatattgtacactatgcagatgatgattgggaagcactaatccatcagttgaaaataaatccttatgttctgagtgacaaagaccgagccaaccttatcaacaacatctttgaacttgcaggcctaggcaaggtacctctcaagagggcctttgatttgattaattatcttggaaatgagaaccatactgcacccatcaccgaagccctgtttcagacagacctcatctataacctccttgaaaaactgggatacatggatctggcctcaagactggtgactagggtatttaaattacttcaaaaccaaattcaacaacaaacttggactgatgagggcactccatctatgcgagagcttcggtcagccctgctagagtttgcttgcacccacaacctggggaactgctctactactgccatgaaactgtttgatgactggatggcatccaatggaactcaaagcctacctactgatgtcatgacaactgtgttcaaagttggagcaaaaactgacaaaggctggtcattccttttgggcaaatacatttctataggctctgaagcagagaagaacaaaatactagaagcacttgccagctcagaggatgtgcggaagctttactggttaatgaaaagtagcctgaatggagataacttccgaacacagaagctgtcttttatcattagaacagtgggtcgacattttcctggacacttactggcatgggattttgtcaaagagaactggaataagcttgtacagaagttccctctggggtcctataccatacaaaatattgttgctggatcaacttacctgttttcaacaaagacacatttatctgaggttcaggcattctttgaaaatcagtcagaggcaaccttccggcttcgttgtgtccaggaggctttggaagtcattcagttgaatatccagtggatggagaagaacctcaaaagtctcacatggtggctgtagcatgcacaaccgcacctcattttgttgcccattcagagagcttgtaagcttgggctctgccgcttttgcaaaagccaaggtaaagccaggatcgctgccaagttgtttgcactctttggagttctagttagctcagggcctgactgtatttttcatccatcttttctgaagtgtctttgggcagtatgtagttatttattacaaaattatattcacctaaatgccaaccatctacaaaaacaatgagtaatttttctactttgaagatacacagatggggacaaaaaccctgttttggaattctgttctattcctcagtatccagaaagttactgacacagtaaaacaaggaaagttctaccctaagagccgccatcacttcaggccgctggtttgtcagccatctgttgcttcttattgatagatggcattggaatgtggtacaaagttagctctgaagaatatggtaacgaagacaataaagcatgcactgtaagaactgacctcaggtgtgcagatctactttgatttggggttttgattaattctttatttttctgaaaaaaagtttaaataatgtctgtaactattgtgtttttttcctgccgaatagccaggtgctacagatttttaaaatttttgttgtattgaaaagctaaacaaggccaaaaggttaaattttttgaatatttaagactttctttttcatcttttatagcgttaccataggaaactgttccaaactgagttagctttaattataattattttattcataaatggtgatagtccccagatctgtacacctttatcactccctgccgtagatatactttaggttagtatttctacattcgtggcaagcattttggtaacac

SEQ ID NO: 6675 - DNA, 5250 bp, Homo Sapiens
  NM_175921
atggcggccgcagtctctagtgtggtgagacgagtggaagagctcggggatctggctcaggcccacatacagcaacttagcgaagctgccggtgaagatgatcactttttaattcgggcctctgcagcattagaaaaattgaaactcctgtgtggagaagagaaagaatgttcaaatccatcaaatcttctagaactttacacacaggctattttggacatgacatattttgaggagaacaagctagtagatgaagattttcctgaagactcttcttcacagaaagtaaaagagctgattagttttctttcagaaccagaaattttagtaaaggaaaataatatgcatccaaaacactgcaatttgcttggggatgagctactggaatgtctctcttggagacgaggagccctgctgtatatgtattgtcattctcttaccaaaagaagagagtggctcttaagaaaatccagtttgcttaaaaagtaccttcttgatggaatcagttacttgctacagatgctaaattatcgatgtcctatccagttaaatgaaggagtttctttccaagatctagacacagctaaattactgagtgcaggaatatttagtgacattcatctgctggctatgatgtacagtggagaaatgtgttactggggatcgaagtattgtgctgatcagcaaccagaaaatcatgaagtggatactagtgtgtctggagcgggctgcactacatacaaggaacccttggatttccgagaagtaggagaaaaaatcttgaaaaagtatgtatctgtgtgtgaaggacccctgaaagaacaagaatggaatacaacgaatgcaaaacaaattttaaacttctttcatcatcgctgtaactagtaagttcatctagtccttttcaaatagaaaaacaacaaaacccatgaaatggaaaagagagttccaaaaaagaagacctgttgatactgaatatgagaacattacactgcataaagatatccagcttgggtaccctactaaaacaacatcaccatctttttcattatatattagtaaacctatgaagggatgattctttaatttctaaagtgttgttcaaactcaccttaaaatacagatgttatgtcactaataatgagtagtaacccaatttagctttacaaagattttttctattactttttttttttattgtggtatatgtaacacaagtttaccatttttatcatctttagattatttttaaatctcactaccttgaagtttgccatgcttcagaaattaaagtcaagttacttcactgctttgaatacatactatggatataaatgtaggcaaaatgaaagattatgactaatattcagattccattttcaataaggtaaataatgaaagatctcacaaaggaatcattgtgtttaattattttgccatgtattactaattgtatttaaaatttctacttcccttaggcattttataaaaatttaaaaattatttttctattttgtttaaaagacaatgcatggcttttcaagtgagtaatgaagataaaaaccaagctaggttagtctaccattagttcatatgtttttgtagcacatcttttcataacatactgaaattttaatgttttttgcctttaataataggggtgagtgttaaaggccagagagcctaacttgatatcttgctcatggtctttctgtctacctcaactcctgttgtcatctttggatgatctttctgataccttgctgataccttggacttctgcccagtgactttattacattccagcagcttactcccgtggccgcactttgaatgtcaccaccttgagtttctctttctggtaaaatttcagtaactgataactgccctcttttcagttttttcacttccttattttattgacttttctctcctttatgctcattccacattcttcagttccttcttacccccttttcttgactgctccccttcctcctaaactgtcagcccctttcaggctttcttccctatccaccctcagctttatgggatactatatgaactaatctcaccagttattcttctttccctggtcttttagtctagtcctttggcaagccctcaacctcagattaatcctatttattatctaccttttcggggatgctgagttctttgtgatgggtagtccttcaaagtagaatcactacaagtgtctcacttcagccttagaaaagccctcaatgtaaaccttatgtttgttactagggtggcctctctcccatttcccgctgtggctgagccaaacttcattactttccttaggccctctgcccctcccctagcatatggctctttctcctattgaacagaaaattgagactatgaagaggtcaacttgtatttaccaactttactcattttcccattttagaggaaaagaggttgcctgcttcctatcaaaggcgactctgtgctacatgttggtttcatcttcgctgtctctctcatttccccacaaagtgttgtctcactttctgcctaccttttaggtattgatcttcactatatttttttctctctctctcttttttttttttactttacatattttatacaatgtcattcataactatggcttcttttaccaccagtaataacagactgagtctcaaacctgtaacttgtatcctgacttatctcttgctttctaaaccttgtttctaactgtctatcaaatatcttcattagacatcccacagtaattttaagctcagtgtttccaaacgtcaagtcctcatctgttatataaaatcctttctgctttgtaagttttctctttttgggattttccgcagatcagggcaacacagaatgactaccttcccagccatgtctctgcagtcatcctgtgtaatcatgttctagtccagtgttgctcaaacagttaaaatccaggctgcttttggtaaacatacaaattctgatatagagcctctgtggcaaagggaatttctcagttcctgccccagcccccttgtttatcattacacagctaagatttttatttaacttagcattttagcaagttttcttatgaaaatacctttgtgctttctaagtataaagatttaaattatttttaatacggtttttagaaccacagactatccctctttttagagcatcctgatcaattgcaagtacttccacttcttccctaaatgcgctttgtgtgttttccacctcagtagccttgcacacatcattacttctgcatccttctttgtgaccaagtgaatacctacctacctcttaggactcagcttcagtgattctgttttcataggctttttaaagcccttttcagtcaaattagatgctcctttgttctggtcctttactcttcccctcccatgttgtcgcactgatcacactgctttgtaattattttctttattgttggtaaactccatattttaaaaatttacctgtatacatagtgcttaatgcatggtaggcccttagtaatgtttttgaattaatgaggcatgattctaaatgccaaactttgcacaaaaagttgttgctattggattccaaactgctatgccctctataccagtggctgacaaggcatatagggatatatgccatcctgagaggagtaaagtgtttagattctgaacctgagaaaagagaactttctcttaagaagttggaaacttcattttaccttcgtgaccctggtagaccacttggtctcactggttggtacaattatgagggtagtactgggtgctttttatacaactttccatcccccacacagttggagaataatttgtagaccatggcagttaaaatgctttttactctggtgtattatagaataatgaacacatttttatatatgttaaagcctgctaaatcattcacttagaatgaagtaacctcaaggtaccaaataccccacataaggaaagtactacactaaattcactcaactattgtatgcctaccatatgccagattttatcctagaccctgaggatatagctttttaaaaccccctcctgtttcagagcttatattctagtggaggaagttagacaagcattttaagtaataaatgtatagagagtgtcaagtgatgagtaccatgaagaagaataaatgagggtaaggggctagtgtgatagggagaggggtgggatgccatcatatttaggggtggttgggaactgtctactgctttagcatttgtgtcttcaaatttctctcctttggttatataccttgcgtattccgcacattgataaagtttctttcttacagaagttctgatattgaattaaggaatgggtcactacttaagactttatcatttcagctacacataaaaggtttctctcccctatggattttgctaatggttgagtgatacctaaaggccttgttgcattttttacacttggggtttctcttcggtttgaattctctcatggttaccaaaactctgttaaaggacttttcacagtcgttaaatgtgtatggctctttcccaatatgaatttttttgatgttaactaggcttttagacttagttaaagacctgtgtgctctgctgcatttatagggttttgggctgctgagaataattgatgctgattaaggtgcaaatcatgactaaagacttttctttcttcttttgcatatagtagagtgaggtgagggtcgtggctaaaaccccacaataactttacattcctagctttacagtcttgctgtgaattctctggtgttcattaaagtgtgagctgtgttaaaaggcattcttagattcattttaaccacatttttaaaaactcacagttggttaacatgatggtttcagattgcttgcctcttttctctttctaccttacagggctccttttctagcttaaataagggtactccatctgccacagaatccaggattctatagttttttagtttcacttccctatgttctttttttttttttaatttttaacaatgagatgataccatgttacagcggtattacattaagatacatttaatatagccacaattaaagtatgtattatgtatttatgctggtgttctttcatgttatttcttctagtgaaaatttccaagtaaactgttattgagcatatacatttttaaaaaaataaaaccatacacccctaaaaaaaaaaaaaaaaaaaaaaaaaaaaa

SEQ ID NO: 6676 - DNA, 1884 bp, Homo Sapiens
  NM_176096
cggaggctcggccacaacgccactggattggtggtagggcggggcgggccacagtctccagcctgaagcggaagtggaggaaagatggaggaccatcagcacgtgcccatcgacatccagaccagcaagctgctcgattggctggtggacagaaggcactgcagcctgaaatggcagagtctggtgctgacgatccgcgagaagatcaatgctgccatccaggacatgccagagagcgaagagatcgcccagctgctgtctgggtcctacattcactactttcactgcctaagaatcctggaccttctcaaaggcacagaggcctccacgaagaatatttttggccgatactcttcacagcggatgaaggattggcaggagattatagctctgtatgagaaggacaacacctacttagtggaactctctagcctcctggttcggaatgtcaactatgagatcccctcactgaagaagcagattgccaagtgccagcagctgcagcaagaatacagccgcaaggaggaggagtgccaggcaggggctgccgagatgcgggagcagttctaccactcctgcaagcagtatggcatcacgggcgaaaatgtccgaggagaactgctggccctggtgaaggacctgccgagtcagctggctgagattggggcagcggctcagcagtccctgggggaagccattgacgtgtaccaggcgtctgtggggtttgtgtgtgagagccccacagagcaggtgttgccaatgctgcggttcgtgcagaagcggggaaactcaacggtgtacgagtggaggacagggacagagccctctgtggtggaacgaccccacctcgaggagcttcctgagcaggtggcagaagatgcgattgactggggcgactttggggtagaggcagtgtctgaggggactgactctggcatctctgccgaggctgctggaatcgactggggcatcttcccggaatcagattcaaaggatcctggaggtgatgggatagactggggagacgatgctgttgctttgcagatcacagtgctggaagcaggaacccaggctccagaaggtgttgccaggggcccagatgccctgacactgcttgaatacactgagacccggaatcagttccttgatgagctcatggagcttgagatcttcttagcccagagagcagtggagttgagtgaggaggcagatgtcctgtctgtgagccagttccagctggctccagccatcctgcagggccagaccaaagagaagatggttaccatggtgtcagtgctggaggatctgattggcaagcttaccagtcttcagctgcaacacctgtttatgatcctggcctcaccaaggtatgtggaccgagtgactgaattcctccagcaaaagctgaagcagtcccagctgctggctttgaagaaagagctgatggtgcagaagcagcaggaggcacttgaggagcaggcggctctggagcctaagctggacctgctactggagaagaccaaggagctgcagaagctgattgaagctgacatctccaagaggtacagcgggcgccctgtgaacctgatgggaacctctctgtgacaccctccgtgttcttgcctgcccatcttctccgcttttgggatgaagatgatagccagggctgttgttttggggcccttcaaggcaaaagaccaggctgactggaagatggaaagccacaggaaggaagcggcacctgatggtgatcttggcactctccatgttctctacaagaagctgtggtgattggccctgtggtctaccaggcgaaaaccacagattctccttctagttagtatagcggacttaataaaagaggaaaaaactcttgcttcagta

SEQ ID NO: 6677 - DNA, 4893 bp, Homo Sapiens
  NM_176787
gagaattatcgcgatagcagcagcggccgggcaggtattgggggcgttccggaattgaggggtggttgtagtggtggcttaggaataccctcccggctatcgcttcagtgggtagaggggaccactgcccgagagctttaatggagctgggtcctgccttcgcgctgaggagccctcgttttcgagatcaggcctgaccgggataagctccagaaacagtattatgtctcagtcctgtgcaaagtgagatgagctgtagcctttggagacctataattttgaacatagatgttccttaaaagctaaatctttttgaacagatgatgataaacctggaagagattcaccaacaatagcaaattacacactggcttggaaagtactcccatgttccgtttgatcttggcaatttaatgctgttcttgaagactaattagttacactggatatgctgctgttctttactttgggattgcttatacattttgtgttcttcgcctccatctttgacatttattttacatctcctttggttcatggaatgactcctcagtttacaccattgcctcctccagcgagaagattagtgttgtttgttgctgatggccttcgagcagatgcactttacgaattagatgaaaatggaaactctagagcaccgtttattaggaatatcataatgcatgaaggcagctggggcatatctcatacacgtgtgccaacagaatctcggccaggtcatgtagctctgatagctgggttttatgaagatgtcagtgcagttgccaaaggatggaaggaaaatcctgtagagtttgattctctttttaatgaaagtaaatacacatggagctggggaagcccagatatcctgcctatgtttgccaaaggtgctagtggagaccacgtttatacatatagttatgatgctaaaagagaggattttggtgctcaagatgcaacaaaactggatacgtgggtttttgataatgttaaggacttctttcatcatgccagaaacaaccagtctttgttttctaaaataaatgaagagaaaatagtttttttcttacatttattaggaatagatacaaacggacatgctcatcgaccatcctcgagagactacaagcacaatattaaaaaagttgatgatggagttaaagaaatcgtgtctatgtttaaccacttctatggaaatgatgggaaaacaacatttatctttacctctgaccatggaatgacagactggggttcccatggggctggtcatccttcagagactttaactcctttagtcacttggggagctggaatcaagtatccccaaagagtatcagctcagcaatttgatgatgcatttttgaaagagtggagattggagaattggaagaggctagatgtcaatcaggctgatattgcaccattgatgacttcccttattggagttccctttcctcttaactcagtgggaatccttcctgtggattatcttaacaacactgatctcttcaaagcagagagcatgtttacaaatgcagtacagattcttgaacagttcaaggtgaaaatgactcagaagaaagaagttactttaccatttttgtttacaccatttaaactgctttctgattccaaacagttcaacattttaagaaaagcaagatcttatataaaacacagaaagtttgatgaagtggtctccctttgcaaggagctaattcatcttgcattgaaaggattgtcctattatcacacatatgacagattctttttgggcgtcaatgttgttattggttttgtgggatggatatcttatgcctctttgttgatcatcaagtctcattccaaccttataaaaggtgttagtaaagaagtgaagaaaccaagccatctcctgccttgtagttttgtagctattggcattttagtagcattttttctgctgattcaagcctgtccctggacatattatgtatatggtttgttgccactgccaatatggtatgcggttctaagagaatttcaagttattcaggaccttgttgtatcagtgttgacctatcctctgagccattttgttgggtacctgttagcctttaccctgggaattgaagtattagttctcagttttttctaccgctatatgcttaccgctggacttactgcctttgcagcttggccatttctcactcggctgtggactcgagcaaagatgacctcactgagttggactttcttctctttgctcctggcagtgttcccactgatgccggttgtaggtcgaaagccagacatctctctagtgatgggtgcaggcttgctggttcttctgttatccctgtgtgttgtaacatctctcatgaaaagaaaagatagctttataaaggaagagctattggtacatctgttacaggtgctgagcacagtgctctccatgtatgttgtgtatagcactcagagtagtctactcaggaagcaaggactgcctctcatgaatcaaattattagctgggcaacattagcctcttccttggttgtgccactactgagttctccagttctctttcagcgattgttcagcatacttctttcattgatgtcaacctacctacttctaagcacagggtatgaagctctctttccactagtgttgtcttgtttgatgtttgtctggataaacatagaacaagaaactctacaacaatctggtgtttgctgtaaacaaaagctcaccagtatccagttctcttataatactgatataactcagtttcgacagctatatctggatgacatccgtagggcctttttccttgttttcttcttagtgacagcattttttggaactggaaatatagcttctattaacagctttgatcttgcctctgtctattgctttctgactgtgttcagtccttttatgatgggagccctgatgatgtggaagattttaatcccctttgttcttgttatgtgtgcttttgaagcagttcagttgactactcagttatcgtcaaaaagcctttttctcattgttctcgtcatatcagacattatggctttgcattttttcttcttggtcaaggattatggcagctggcttgatattgggacaagcatcagccactatgtgattgtcatgtccatgaccatctttttggtgttcctcaatggcctggcccagctgctcacaacgaagaaactcagactatgtggcaaacccaaaagtcacttcatgtgaggttgctgaagcaccattcagcatctggatcctgattctccttttaagctaaaatctcatcaaggcttcaataagaagatggatatggatatatagtatattctactcctgtaaggaaaatggtatttggaattccgaattgacaggttatctggaacaaaggagcttctttttttttctaggttttgcaggcatgaaatagtgattatatctgtggaaaagcataggaaggcattctcctttttcatttttttcctttggctggcagctcttcccagtgatgttgagagcacctgcagcaatctggtccccagtcgcacaacttcccacatacccagaggagagcatatgcctgtgggggcagtgctgatggcatccagagtcattgctgtggctgagctggaaggaaatcaccaggtgccaccgtcaatatttatcagctttcagcactggttttgttagacagtcagggtgtattatttcaagagcttcaataaaaaaagtgtttgcaggtatttgtcatatttctttagtatgcaataatgctatcttatcctttttagtgctatttctcaggttttctcagtcaaccagctagatgcatgtgatgcatgtctatccttcactttttttttttcatttctggattttcctgggatttctgacaacacaaaagtagaaagtgcttggtatttctgtcttatacataggaaaacatttaaaataaatagtttttaattgtaggctcaacatctgttaccccatagctttttcgtatattgtttctttccctttgaatttctttttactgtcatctattattttaacaggagttaaaataactcctgttaaactttctgacaatatcataagaattcatattaaaggtgttattctttctggttgtgagattctagcacaaaggcctaaaatcatcaaattagatttccatttgtaaacaaattctaatgggcaaaatatcttgagagcagtttttatatggattatccataaaatgacctttacatatccctgcagagttggccttttgcccgtggtgtgctagtagctttggctgatgctaagctttcctggtatgcgccctatttttaagaagtaattgcttttgaattaagttatagcattactaattcatgttaatgactaggaaaccctctgtaatttacaagatttttcaaattggtggggagtgaataaatacaatttaaaagagtcagaaatcagtttggcaaagtgtactttcttaatttctatttatgatgaagtatagtcataatttatttgtaatactactttatggtataccagtgaaagaactgtagtataaaaaagaggtattaatgttttatgaaatctcatgcatcagttcatagcataaaatctagctggacaactaagaagctatggtagcaaacagtgatgttgatggaatgagaatcatgaactttcatattacctcaaaggatttttttatcagtttttttcacacatcagaaaaaactgactgtataaacacttatcactgacctttttctatgtgtagttttgccttttatcttttcccaaatttttataaagagaaattaataaatattttattacaacattgtaaaaaaaaaaaaaaaaaa

SEQ ID NO: 6678 - DNA, 2965 bp, Homo Sapiens
  NM_176789
agcgggggggtaacgcggggccgccaggtgacagctaatggcggcggccgcctgaggcgggcgggcggtatagagcgggcggcaggaggcaagcagcgaaaccttcccggccgccgctcccgtcccgacggcggcttccccaaggcggcaggactcggcgcgccatggacaggccggcggcggcggcggcggcgggctgcgagggcggcgggggcccgaacccggggccggcgggcggcaggaggcctcctcgggccgcggggggcgccaccgccggctcccggcagcccagcgtggagaccctggacagtcccacaggatcacatgttgaatggtgtaaacagcttatagctgctacaatttctagtcagatttcaggttcagtgacatcagaaaatgtgtccagagattacaaggctctaagggatggaaataagctggcacagatggaagaggctccacttttcccaggagaatcaattaaagccattgtgaaagatgtcatgtatatctgcccatttatgggagcagtgagtggaaccctgacagtgacggactttaagctgtacttcaaaaatgtcgagagggacccgcattttatccttgatgttccccttggagtgatcagcagagtggagaagattggagcacagagccatggagacaattcctgtggtatagagatagtgtgcaaggatatgaggaacttgcggcttgcttataaacaggaagaacagagtaaactagggatatttgaaaacctcaacaaacatgcatttcctctttctaacggacaggcactatttgcattcagctataaagaaaaatttccaattaatggctggaaagtttatgatccagtatctgaatataagagacagggcttgccaaatgagagttggaaaatatccaaaataaacagtaattatgagttctgtgacacctaccctgccatcattgttgtgccaactagtgtaaaagatgatgacctttcaaaagtggcagcttttcgagcaaaaggcagagtccctgtgttgtcatggattcatccggaaagtcaagcaacgattacccgttgcagccagccacttgtgggtcccaatgataagcgctgcaaagaggatgaaaaatacttgcaaacaataatggatgctaacgcacagtcacacaagcttatcatctttgatgctcgacaaaacagtgtcgctgataccaacaagacaaagggtggaggatatgaaagtgaaagtgcttacccaaatgcagaacttgtgttcttggagatccacaacattcatgtcatgcgagagtcactacgcaaattaaaagagattgtgtacccttcgatcgatgaggcgcggtggctctccaatgtggatgggacgcattggctggaatatataaggatgctgcttgctggggcagtaagaattgctgataaaatagaatctgggaaaacatctgtggtggtgcattgcagcgacggttgggaccgaacagcccagctcacatctctggctatgctaatgttggacagttactacaggaccattaaaggatttgaaactctcgtagaaaaggagtggataagctttggacacaggtttgcactgcgagtgggccatggtaatgacaaccatgcggatgctgaccgatctcccatatttctgcagtttgttgattgtgtttggcaaatgacaaggcagtttccttcagcattcgagtttaatgagctattcttgattacaattttggatcacctttatagctgtctttttgggacctttttgtgcaactgtgaacagcagcgattcaaagaggcatggggggctgggacccagcgagcccgtggctctctcaggagtagatgagtgctagaccctggacctcctgactccgagttcatgtagtctccgctgcaccaactccaaaaccgtgggattctgcttttcatcctctgtggtgttggccagatcatacttgaaggccttggaaatggagtctgctgattagccaaaaagcccactttaggatgtatatacaaagacgatatctttatggtcgtatatcaatagccagctagacgagttttctaatcccttctttgtgaattatgaaaaccacgtgttatatcctgttgctagtctgagtcatttggaattgtgggtaaattattatgtacgatggaatccacggatgagacctcagatgcccattcaccagaatctcaaggagctgctggccgtcagggcggagctgcagaagcgtgtggagggcctacagcgggaggtggccacgcgcgccgtctcatcctcatctgagcggggctcctcgccctcccactccgccacctccgtccacacctcggtctgatgggcgagaaatatgtaatcccctggctgactaggactgttaaacatagtgtggactggatgatgccttcgacaaaccagagaagccaagttggggggagctggtgcctggagtgggccctgtgcacctcacctggcggaggctggggggggctctgtcagcaggaccctagaggagactctcattcgattttaaagaagcacaacgggtcattttcctttgtatgttcctagcgcagaactgtttctaaaacaacttgaagtatagttttgttatctaagcaatttttgttttaagtaagtaagtgtactagaatgcgaagccgttatggttcaggtttttaaaaactggtacagtattgtatttgtctcatctgttgcactgtatttcaatcatctgtaattaaaatgatcatatgtttgctccctggtcttttttaagtaagtaagtaagtatcttagtagatttttcctttgaggaaaatcggtaataaaataacatggattgaatgtttactgtgcgtcaagcacagttaatatatgatgatgtaaagtaactaactttatgtgatttaattcattcagtaaattgt

SEQ ID NO: 6679 - DNA, 2151 bp, Homo Sapiens
  NM_176792
ccggaagcctcgaggtttagtcccgcccccctctcctcgctgcttaggctccgcggcctccaagctgtagctatgacggcgcgcgggactccgagccgcttcttggccagcgttctccacaacggactgggtcgctatgtgcagcagctgcagcgtctgagcttcagcgtcagccgcgacggcgcctcgtctcgcggcgccagggagttcgtggagcgggaggtgatcgacttcgcccgacggaatccaggggtcgtaatatatgtaaactcgcgtccgtgctgcgtgcccagagtagtggccgaataccttaacggggctgtgcgcgaggagagcatccactgcaagtcggtcgaggagatctcgacgctggtgcagaagctggccgaccagtcgggcttggacgtgatccgcatccgcaagcccttccacaccgacaaccctagcatccagggccagtggcaccccttcaccaacaagccgaccacgttccgcgggctacgcccccgagaggttcaggatcctgccccagcccaggacactggcctgagactgtctgcagttgcaccgcagatcctcctgcccggctggcccgacccaccagacctccccacagtggatcctatctcatcctcattgacctctgctccagcccctatgctgtccgcagtttcttgcctcccgattgtccctgcactgaccactgtgtgctcagcgtgaaggctgcatagaagtgtgtacggcttgaggtttcagcatccaggctgcagaccccacgcagtgtctcatacagtggaatgtggcagatgagacgggctttcaggaaggaagtccacttcttctgcaggatcttcttccctcccaggtctccctggggaggtagaggcacgggataaggggccagggtcagaggtccagcctctatacccgtgccccaacgtcagcccaatccaccttgcagacacgagccacacgggccacacggtgactgctgcggctctgagtgaagctgccagagccctcctcagtggcacgctccgtgaagaagtagtacaccttgtcatcatcacccactgcactggccttgctctcccgcacgaggacggagaacacaaactccgcatctgtgggtcaggcagtttgagaggcttttgagacaggctggggattcctttccctcactctgaggctgacccctcacttgacaacacacaggaatggaatggacaggctcacctggggatttgggggtggggtggtcagctggccaagggagtaaaaatgaagaaatagtcccctaccccccatcatcctgtgcctcatcctcctaaccattgagccaatgcattggtgtctcctcagttctcagggagtgtgggtggcggctccggcggatgtcaggaatgctccggaattcatacctagtggctgtgtagaggcctccatctggcgtggggatattccaggcatgagagacatgtcatattcaacagggcacatgacatatacatggtggcaggtcctagagatgagatccacatcctaaaaataccatgtctgtgatagggaagaaggcctgctcaccaatgatgaggcctgtgaagccacgggctgggtcataaggacacttctccttcccctcctcgaagctggttggcaaggtgaaggcctcagcatcctagggaacaaggaaccagcagtaagtggttccgaagacaggcagggacagtggctcaaagtcagatcagtctggggtcagggatcagcgatcagggataggggcaggttgtatggcagatgcacctgacagcaataacttaagcatcccctgagaatgaccttatggcctcaaaacaatgtatgtttggagttccaaatctgcaagtggccaacctagagattcactccttatctatgaagaacatctgagcccctagcccatcctgtggaacacatgctgtccaggggatcaaggccctttgttttgggttaaatgaagtttgccaggtggaggtgattagggggaggatgctaagtgaaaatgctataaaaactgcatggtttttacaaaggggaatggttctccagtgcagcccgccgccactggagtgccctgtatggaagtccccttaataaaccatccgtctcctt

SEQ ID NO: 6680 - DNA, 3715 bp, Homo Sapiens
  NM_176800
gcggcagctcttttccttcttcctccacttcccctaccctccaccgtccgggagccgccgccaccgccgccgaggagtcaggaagttcaagatggccgccgcggagacccagtcgctacgggagcagccagagatggaagatgctaattctgaaaagagtataaatgaagaaaatggagaagtatcagaagaccagtctcaaaataagcacagtcgtcacaaaaaaaagaagcataaacacagaagtaaacataagaaacataaacattcctcagaagaagacaaggataaaaaacataaacataagcataaacataagaaacacaaaagaaaagagattattgatgcttctgataaagagggtatgtctccagcaaaaagaactaaacttgatgatttagctttgctagaagacttggaaaaacagagagccttgattaaggccgaacttgataatgagttaatggaaggaaaggtccagtctggtatggggctcattttgcaaggttatgagtctggctctgaagaagagggggaaattcatgaaaaggcaagaaatggaaataggtctagtactagatcttcaagtacaaaggggaaacttgaacttgtggacaataaaattactacaaagaaacgaagtaaaagcagatccaaagaacggactagacataggtctgataaaaagaaaagtaaggggggtattgaaatcgttaaagagaaaacaactaggagcaagtcaaaggagaggaaaaaatctaaaagcccatccaaaagaagtaagtctcaagatcaagcaaggaaatcaaaatcccctacccttagaaggcgatctcaagagaaaattggtaaggccagatctcctactgatgataaggttaaaattgaagataaaagtaaatcaaaagataggaaaaaatccccaattataaatgaaagtagaagtcgcgatcgaggtaaaaaatccagatccccagttgatttaagaggtaaatccaaagacagaaggtcacggtccaaagagagaaaatcaaaacggtctgaaactgataaagaaaagaagccaattaaatctccctctaaagatgcttcatctgggaaagaaaataggtcacccagcagaagacctggtcgtagtcctaaaagaagaagtttgtctccaaaaccacgtgataaatcaagaagaagcaggtctccacttttgaatgatagaagatctaagcagagcaaatccccctcgcggacactgtctcctgggagaagagccaagagccgatccttagaaagaaaacgacgagaaccagagaggagacgactttcttctccaagaacacgacctcgagatgatatcctcagtagacgtgaaagatcaaaagatgccagccccatcaatagatggtctccaacccgaagaagaagtagatctcccattagaaggaggtctcgttccccactcagacgtagcaggtctccaagaagaagaagcagatctcctcggagaagggacagaggtcggaggagcagatcacgcttgcgaaggcggtctcgatcacgcggtggtcgtagacgaaggagcagaagcaaagtaaaggaagataaatttaaaggaagtctttctgaaggaatgaaagttgagcaggaatcttcgtctgatgataaccttgaagactttgatgtagaggaagaagatgaagaagccctaatagaacagagaagaatccaaaggcaggcaattgttcagaaatataaataccttgctgaagatagcaacatgtctgtgccatctgaaccaagcagcccccagagcagtacgagaacacgatcaccatctccagatgacattctggagcgagtagctgctgatgttaaagagtatgaacgggaaaatgttgatacatttgaggcctcagtgaaagccaagcataatctaatgacagttgaacagaataatggttcatctcagaagaagttgttggcacctgatatgtttacagaatctgatgatatgtttgctgcgtattttgatagtgctcgtcttcgggccgctggcattggaaaagatttcaaagagaatcccaacctcagagataactggaccgatgcagaaggctattatcgtgtgaacataggtgaagtcctagataaacgttacaatgtgtatggctacactgggcaaggtgtattcagtaatgttgtacgagccagagataatgcaagagccaaccaagaagtggctgtaaagatcatcagaaacaatgagctcatgcaaaagactggtttaaaagaattagagttcttgaaaaaacttaatgatgctgatcctgatgacaaatttcattgtctgagactcttcaggcacttctatcacaagcagcatctttgtctggtattcgagcctctcagcatgaacttacgagaggtgttaaaaaaatatggtaaagatgttggtcttcatattaaagctgtaagatcctatagtcagcagttgttcctggcattgaaactccttaaaagatgcaatatcctacatgcagatatcaagccagacaatatcctggttaatgaatccaaaactattttaaagctttgcgattttgggtcggcttcacatgttgcggataatgacataacaccttatcttgtcagtagattttatcgtgctcctgaaatcattataggtaaaagctatgactatggtatagatatgtggtctgtaggttgcaccttatacgaactctatactggaaaaattttattccctggcaaaaccaataaccatatgctgaagcttgcaatggatctcaaaggaaagatgccaaataagatgattcgaaaaggtgtgttcaaagatcagcattttgatcaaaatctcaacttcatgtacatagaagttgataaagtaacagagagggagaaagttactgttatgagcaccattaatccaactaaggacctgttggctgacttgattgggtgccagagacttcctgaagaccaacgtaagaaagtacaccagctaaaggacttgttggaccagattctgatgttggacccagctaaacgaattagcatcaaccaggccctacagcacgccttcatccaggaaaaaatttaaacaagatgaagaaactccaagggtttgagtgtgtgtgtgcaggccacagcagcatgcccttggtgtagtcagtgccgaaaggggtctgttccttcttgagcctgcctgcagggatggtctccttttaaagcaggttgtgtgcagcattcagtacactgaaggcataaaccttccactcttgaacaaagcagctgctttttaaaagcgagaaaaaggaaaacggggcacaggccattcgacgccttctccaaggggtctgatttgctgagacaccagcttcaccttcttaacaaggcacctaattacaacaagcatgcacattttggtgcattcaagaatggaaaatcagaatagcagcattgattcttctggtgcagctcagtggaagatgatgacaaccagaagacatgagctaagggtaagggactgttctgaagaacctttccatttagtgatcaagatatggaagctgatttctgaaaatgctcagtgtgtactctaattatttatggtaccatttgaattgtaacttgcattttagcagtgcatgtttctaattgacttactgggaaactgaataaaatatgcctcttattatca

SEQ ID NO: 6681 - DNA, 3934 bp, Homo Sapiens
  NM_176815
gagatactgatttgctcgcgctatagaattcttgtcgaagaggcttagctcccgcgggagatttcgtgcgcagttacttccggtagctggtaaaggctgatacttcccaggacgcggaggtaacgggccagggccaaagcgactttcgctacttggattggtcggcgtagctttgggcggccggaccttagaaagtcacacatctgcgcgcctgtgcggcccctgcttctgcggatgctgaggcacgtaaaaaaatttgaagaagggaatttcgcggcattcttggcctggcttcctggcgtagccagcaagttcggaggtgttaaccgctgctgtcatgtttcttttgctaaactgcatcgtcgctgtgtcccaaaacatgggcatcggcaagaacggggacctgcccaggccgccgctcaggaatgaattcaggtatttccagagaatgaccacaacttcttcagtagagggtaaacagaatctggtgattatgggtaggaagacctggttctccattcctgagaagaatcgacctttaaaggatagaattaatttagttctcagcagagaactcaaggaacctccacaaggagctcattttcttgccagaagtttggatgatgccttaaaacttactgaacgaccagaattagcaaataaagtagacatgatttggatagttggtggcagttctgtttataaggaagccatgaatcacctaggccatcttaaactatttgtgacaaggatcatgcaggactttgaaagtgacacgtttttttcagaaattgacttggagaaatataaacttctgcctgaatacccaggtgttctctctgatgtccaggaggggaaacacatcaagtacaaatttgaagtatgtgagaaggatgattaatatgaaggtgttttctggtttaagttgttccccctccctctgagaaaagtatgcatttttacattagaaaagggacttttgttgacttcagatctatggataattatttctaagcaacgtgtttttattcctcactaatcttggctatatcagataccatttatgaaacattcttgctataactgtctctccaagaccccgactgagtccccagcacctgctacagtgagctgccattccacacccatcacatgtggcactcttgccactccttgacattgtcaggcttttctaatgttggtagtatttattaaagatgaagatgcacatacccttcagctgagcagtttcactagtaggaaataccaaaagcttcgtacatgtatatccagaggtttgtagacaaatgttgcagccttttttgtaacagtgaaaaactgaaaacaacctggaagtccagtgatgggaaaatgaatatatttctgtcttagattggggaacccaaagcagattccaagactgaaatttaagtgaaagcagtttatttgctaggtcataccagaagtcatcaatcgaagtatggagaaatggaactgagaaggtaaaaaccagttcaaaatcagtgaggaggttctcaatggtaacgagctccatactgctgagatacagggaaacggaggggagaaagctagagtatttaacccccactccttggttgtcagctccctgtcctgtgtgtgggcagaacgtactccacctactcaatagcaagttccaggtgtttgctgaaagaagctgctgtaatgtacgggaacggtgaatgccaaacacttaaagcaattccatgtttaagtatgtaaactcttcatacttttttttttttttctttttaagacagaatttcactcttgttgcccaggcggagtgcaatggaacaaccttggctcacggcaacttcagccttcccaggttcaagcaattctcctgcctcaggctcctgggtggctgggactacaggcgcgtgccaccacgccaggctaattttgtatttttggtggggacattccatgttggtcaggctagtctcgaactcctgacctcaggtgatcctcctgcctcggccttcaggggtgctgggattacaggcatcagccactgcacttggcagatcttcattcttttagtaaaaagtataaagccacacatggtttatttgaaatattttataatttaaaaaagtacagaagcaggaaaaccaattctaggttcaagtgagggatgatggtagtttgaaccaaaggattgcatgtggtaagaaattgtgatttaagatatattttaaagttggaagtagcaggatattctgatggagtttgactttggttttgggcccactgagtttgagatgcctttgagaaatgaaagaagtagagagagaattaaaaactggccaggagtggtggctcacgcctgtggtcccagcactttggggggctgaggtgggtggatcacctgagaccagcttgggcaacatggtggagccctgtctctacagaagatacaaaaattggctgggcattgtggcacacacctgtagtctcgtctactcacggggctgagatggaggattcaattgagcccatgagttcaaggctgcagtgagtcgtgattttgccactgcactcctgcctgggtgacagaagagaccctgtctcaaaaaagaatctgaaaacaacggaaccatgccttcagaattctataaagttattttcaactgataaatctatattcaggcaaagaatcaagggtgaaggtaaaataatacatttttagacaagcaaagactcaggggttacatgtaccctttcttgggaagctatcggagaaaatactccagcaaaatgaaggcgtacacaaaccagagaatgacgtggatccagcaaatagtatccaacacaggcaatattccagctatggagctagctttaaaaagaaacagtaaaaatactaatagattagctgggtgggatggcccatgcttgtagtcccagctactcaggaggctaagcaaaaggatggcttgagcccaagagttcagagcagcctggccaccatagtgagatcccttctcttaaaaataataggttattgccagatttggggcatttggaaagaagtgcattgaagataaagcaaaagtaaaaaaaaaaaaaaacaaaaaaaaacaagggggaagggttggttaggcaataattaattctagggcaggaagaagtacaggataggaagtaagagcatcatacgctgtttttctcaacaatgggcaatatgtacatagtcataatgatgtggtgactgactgcttagcccctaaatctggtaactactttgggacaatatggggggaaaagtgaagatagtgatggtgtaagagctaaatcctcatctgtcatatcaagaaatcactatataatgtataacataatcaagaaatgactaagtagttatgtgaagaaaagaatggaacattgctagaagagttagaagtcattgctccagagaattaggagggatggggcaggggactgttaggatgcattataaactgaagaggcttttaaagattacatgtattaatatatgtattcacttgaaaaactaaaaaaatagtaattttttaaaacccatggaggtaactaccagaaggaaaaactaagagaatgaaaagtgctttcctctggaaagaacaagtcgcaggactgttttcattgtaagacttttggagccatttgattttacttaaccattttcatatatttctttaataaaaataattctatcttaataaaaagttacactcattcattaaaaaaagaattttaagactgtaataagaatcatagtttatttctgttagagaaaggcaatgtgttatacttggaaagaggtcatattaattttatcacatttttgggactcagcatctttatattttctgattttaaataaacaactttgcttatgaaaaaaaaa

SEQ ID NO: 6682 - DNA, 1143 bp, Homo Sapiens
  NM_176817
cctttctgcactgggtggcaaccaggtctttagattagccaactagagaagagaagtagaatagccaattagagaagtgacatcatgttgactctaactcgcatccgcactgtgtcctatgaagtcaggagtacatttctgttcatttcagtcctggagtttgcagtggggtttctgaccaatgccttcgttttcttggtgaatttttgggatgtagtgaagaggcaggcactgagcaacagtgattgtgtgctgctgtgtctcagcatcagccggcttttcctgcatggactgctgttcctgagtgctatccagcttacccacttccagaagttgagtgaaccactgaaccacagctaccaagccatcatcatgctatggatgattgcaaaccaagccaacctctggcttgctgcctgcctcagcctgctttactgctccaagctcatccgtttctctcacaccttcctgatctgcttggcaagctgggtctccaggaagatctcccagatgctcctgggtattattctttgctcctgcatctgcactgtcctctgtgtttggtgcttttttagcagacctcacttcacagtcacaactgtgctattcatgaataacaatacaaggctcaactggcagattaaagatctcaatttattttattcctttctcttctgctatctgtggtctgtgcctcctttcctattgtttctggtttcttctgggatgctgactgtctccctgggaaggcacatgaggacaatgaaggtctataccagaaactctcgtgaccccagcctggaggcccacattaaagccctcaagtctcttgtctcctttttctgcttctttgtgatatcatcctgtgttgccttcatctctgtgcccctactgattctgtggcgcgacaaaataggggtgatggtttgtgttgggataatggcagcttgtccctctgggcatgcagccatcctgatctcaggcaatgccaagttgaggagagctgtgatgaccattctgctctgggctcagagcagcctgaaggtaagagccgaccacaaggcagattcccggacactgtgctgagaatggacatgaaatgagctcttcattaatacgcctgtgagtcttcataaatatgcc

SEQ ID NO: 6683 - DNA, 1376 bp, Homo Sapiens
  NM_176866
gcaggaccgtcattgacgccatgagcgcgctgctgcggctgctgcgcacgggtgccccagccgctgcgtgcctgcggttggggaccagtgcagggaccgggtcgcgccgtgctatggccctgtaccacactgaggagcgcggccagccctgctcgcagaattaccgcctcttctttaagaatgtaactggtcactacatttccccctttcatgatattcctctgaaggtgaactctaaagagattctttcttgtggagaagttattcatgtgaagatccttggaattttggctcttattgatgaaggtgaaacagattggaaattaattgctatcaatgcgaatgatcctgaagcctcaaagtttcatgatattgatgatgttaagaagttcaaaccgggttacctggaagctactcttaattggtttagattatataaggtaccagatggaaaaccagaaaaccagtttgcttttaatggagaattcaaaaacaaggcttttgctcttgaagttattaaatccactcatcaatgttggaaagcattgcttatgaagaagtgtaatggaggagctataaattgcacaaacgtgcagatatctgatagccctttccgttgcactcaagaggaagcaagatcattagttgaatcggtatcatcttcaccaaataaagaaagtaatgaagaagagcaagtgtggcacttccttggcaagtgattgaaacatctgaaattctgctgtcaagattcccatctctaaggactccaagtgctagagacaagggggtctatgagcatttactgacttcctgttaaaacttcattttttcaaactttttgagctatgcaatatataaataaacagtaagaattttaaattactctcctttggacatttattgatataaaaagaagattttggccaggcacggtggctcatgcctgtaatttcagcactttgggaggccgaggtgggcagatcacaaggtcaggagttcaagaccagcctggccagtatgttgaaaccccatctctattaaaaatacaaaaattagccaggcgtggtggtgcatgcctgtagacccagctactcaggaggctgaggcagaagaactgcttgagcccaggaggcagaggttgcagtgagcagagattgtgccactgcactccagcctaggcgacagagagagactccgtctcaaaaaaaaaaaaaagattttgtttcatttcatagcacaaatttagaggcattgagttgaccatttctagtttctatacctgaaggaacccattgattttaccagtttttatttctgtagattggatgtaaaaatcacagattcaataaattaataaactttgtgtaaaaaaaaaa

SEQ ID NO: 6684 - DNA, 8505 bp, Homo Sapiens
  NM_176877
ctcacttccgcccaggtgaggcagggccgacaccgagcccgcccgacccgggctcccacctgctcctccagcgcaccaggtgtctttaagagtgattgaagagaataattcaaaatgcctgaaaatcctgctacagataaactgcaggtgctgcaggtacttgatcgcctgaaaatgaaattgcaggagaagggtgacacgtcgcagaatgagaagttatctatgttttatgagacactaaagagtcctctcttcaaccagatactcacacttcagcagtccatcaagcaactgaagggtcaactcaaccatataccctcagattgttcagccaactttgatttttctaggaaaggtttgttagtgttcacagatggttccattactaatggaaatgtccacaggccctctaataactcgactgtatctgggttatttccgtggaccccgaagttgggaaatgaagactttaactcagtcattcaacagatggctcagggccggcaaattgaatatatagatatagaacggccttcaactggaggccttggattcagtgtggtggccctcagaagtcaaaatctcggaaaagttgatatcttcgtgaaggatgtccagccagggagtgtagcagacagggatcaaagattaaaggaaaatgatcaaatattggccattaatcacacgccattggatcagaacatttcccatcagcaagcaattgcattattacaacaaaccactggatctttgagactgattgtggccagggaaccagtccacacaaaaagcagtacttctagcagcctaaatgatacaactctgcctgaaacagtttgttggggccatgttgaagaggttgagctcattaatgatggctctggactaggttttggaatagttggaggaaaaacaagtggcgtggttgtgaggactatagttcctggaggattagcagatcgagatggaagactccagacaggggaccacatcttgaagattggtggcacaaacgtgcagggaatgaccagtgagcaagttgcacaagttctaaggaactgtgggaattcagtcaggatgctcgttgctagagatccagctggtgacatttcagtcaccccccctgcccctgcagccttacctgttgccctgcctactgtagccagcaagggccctggttctgacagttctctttttgaaacttataatgttgagcttgtgagaaaagatgggcagagtcttggaattagaattgttggctatgttggaacatctcatacaggggaagcttcagggatttatgtgaaaagtataatacctggcagtgctgcgtaccacaatggccacattcaagtgaatgacaaaatagttgctgtcgatggcgtgaacattcagggttttgccaaccatgatgttgttgaagtattacgaaatgcagggcaggtggtacacctaaccctagttcgaaggaagacatcctcatctacttctccacttgaaccaccttcagacagaggaactgttgtagaaccactgaaaccaccagctctctttctaactggagcagtggaaactgaaactaatgtggatggtgaagatgaggaaattaaagaaagaattgatactttaaaaaatgacaacatacaagccttagaaaaattggaaaaagtcccagactctccagaaaatgagctgaaatccagatgggaaaacctgttgggtcctgattatgaagtaatggttgctactttggacacacagattgcagatgatgctgagttacagaaatattcaaagctgctgcctattcacactctgaggcttggtgtggaagtggattcctttgatgggcaccattatatttcttcaattgtttctggtggtcctgttgatacattgggtctcctacagccagaagatgagctgcttgaggtcaatggcatgcagctttatggaaaatctcgccgagaagcagtctcctttcttaaagaagtgccacccccttttactttggtttgctgtcggaggttgtttgatgatgaagcttctgtagatgaaccaaggcgcactgaaacctctcttcctgagacagaggttgaccacaatatggatgtcaatactgaagaagatgatgatggggaattagcactgtggtcccctgaagtcaagattgttgaactagtaaaagattgtaaaggtttgggattcagcattttggattaccaggaccctttagatcctacaagatcagtgattgtgatccgctccctggtagcagatggtgtagcagaaagaagtgggggactattacctggagaccgcctggtctcagtcaatgaatactgtttggacaacacctcacttgctgaagctgtggaaatattgaaagctgtgccaccaggcctagtacaccttggcatctgtaagcctttggtggaagataatgaagaagaaagttgttatattttacattcaagcagtaatgaagacaagactgaattttcaggaacaattcatgatataaattcatctttaatactcgaagcacccaagggatttagagatgaaccatattttaaagaagaacttgtggatgaaccatttctagatctgggaaagtctttccattcccaacaaaaagagatagagcaaagcaaggaggcctgggagatgcatgaatttctgactcctagattgcaggaaatggatgaagaaagagaaatgcttgttgatgaagaatatgagttatatcaagatccctcaccatccatggagttgtatcccttgtcgcacattcaagaggccactcctgtgccctctgtgaatgaacttcactttggtacacagtggttgcatgataatgaaccatccgagtctcaagaggcaagaaccgggaggactgtctattcccaggaggcacagccgtatggctattgccctgaaaatgtgatgaaagaaaattttgtcatggagtccctaccatctgtaccatcaactgaaggaaacagtcaacaaggcagatttgacgacctggaaaatcttaattcattagcaaaaactagtctggatttaggcatgatcccgaatgatgtccaaggtcctagcttgctcattgaccttcctgttgtggctcaaaggagggagcaagaagatttgcctttatatcaacaccaagcgacacgagttatttccaaggcctcagcatacacaggaatgttgtcttctagatatgccactgatacatgtgagttacctgagagagaagaaggcgaaggagaagaaactccaaattttagccactggggtccaccgagaattgttgagatttttagagaacccaatgtgtctcttgggatcagtattgttggtggacaaactgttataaaacgtctaaagaatggagaggagcttaaaggtatattcatcaaacaagttttagaagacagtccagcagggaagacgaacgcacttaaaactggagataaaatacttgaggtgtctggagtagatttgcagaatgcctcacacagcgaagcagttgaggccattaagaatgcaggaaaccctgtggtgttcattgttcagagtttgtcatccactccacgagtcattcctaacgtacataacaaggccaacaaaatcaccggtaaccagaaccaggacacccaagaaaagaaagaaaagaggcaaggaactgctccaccgccaatgaaacttcctcctccttataaagctctgactgatgacagtgatgaaaatgaagaagaagatgcctttaccgaccaaaaaatcagacaaagatatgcagatctgcctggagaactgcacattattgaacttgaaaaagataagaatggacttggactcagccttgctggtaataaagaccgatcacgcatgagcatatttgtggtgggaattaacccggaaggacctgctgccgcagatggacgaatgcgtattggagatgaactcttagagataaacaatcagattctgtatggaagaagtcaccaaaatgcatctgccattattaagactgccccatcaaaggtcaagctggttttcatcagaaacgaggatgcagtcaatcagatggccgttactccctttccagtgccatcaagttctccatcttctattgaggatcagagcggcaccgaacctattagtagtgaggaagatggcagcgtcgaagttggtattaaacaattgcctgaaagtgaaagcttcaaactggctgtcagccagatgaaacagcaaaaatatccaacaaaagtctccttcagttcacaagagataccattagcaccagcttcatcataccattcaacagatgcagacttcacaggctatggtggtttccaggctcctctgtcagtggaccccgcaacgtgtcccattgtccctggacaggaaatgattatagaaatatccaagggacgttcagggcttggtctcagcattgtgggaggaaaagacacacccttgaatgctatagttatccatgaagtctatgaagaaggggcagcagccagagatggaagactttgggctggtgaccagatattagaggttaatggggttgacctgaggaactccagccacgaagaagccatcacagccctgaggcagaccccccagaaggtgcggctggtggtgtatagagatgaggcacactaccgggatgaggagaacttggagattttccctgtggatctgcagaagaaagctggccggggcctgggcctgagcatcgttgggaaacgaaatggaagcggagtgtttatttctgacatcgtgaaaggcggagccgcagacctggatgggagattgattcagggagatcagatcttatctgtgaatggggaggacatgagaaatgcctcacaggagacagtggccaccatcctcaagtgtgcacagggacttgtgcagctagagattggaagactccgagctggttcctggacctccgcaaggacgacatcacagaacagtcagggtagtcagcagagtgcacacagcagctgtcatccctccttcgctcctgtcatcactggcctgcaaaacctggttggcacaaaaagagtttcagatccttcccagaaaaattcaggcacagatatggaaccaaggactgttgagataaacagggagctcagtgatgcccttggaatcagtattgctggaggaagaggaagtcccttaggagatatccccgtatttattgccatgattcaggctagcggagtggccgcacggacacagaagcttaaagttggagatcggattgtcagcattaacgggcaacctttggatgggctgtctcacgcggatgtggttaatctgctgaagaacgcctacgggcgcattatcctgcaggttgtagcagataccaatataagcgccatagcagctcagcttgaaaacatgtctacaggctaccaccttggttcgcccactgctgaacaccatccagaagacacagaggagcagctgcagatgacggccgattaaaacgaggggatcagattttagctgttaatggcgagaccctggaaggtgttactcatgagcaagcagtcgccattctaaaacaccagagagggactgtaaccttaactgtgctgtcatgagcctcgggcctgatcacaagatagatgttgttgtttagaatatccacaggcagatgaagttctgagtgggtatgaaaagcaccctcaactaaaatgcaccttcattcttatttcttgccctctctgctcaggagaaatggctgaggtttcatgtgaatttcccaaatcaacaatcatctcctaatgtttcccagttcctgtcacctgttggcgaggttgatttctaaaacttaaatgagtctacctgttttgcatttaatttcagtgttccgatttctttttttttttttttttttttttttgagacggagtctcactctgtcacccaggctggagtgcaatggcgcaatcttggctcactgcaacctcggcctcccaggttggagcgattctcctgcctcagcctcccgagtagctgggattacaggcatgcatcaccacactgggtttatttttgtttttttagtagagatggagcttccccatgtgggccaggctggtcttgaacttctgacctcaggtgatctgcctgccttggcctcccaaagtgctgggattccaggcgtgagccactgcgcccagcccagtattctgattttaaccaactggttctgattatatttaccaaaactggagttaacttctctttccttatactcttctctccctatcccctactcacaccgaggcttaacagcaacctcagatctcatccaatggacagaaacaaatgttaagcaacttgtcatctcactcatgatttacttatgctaattgtctcttcaagtaagcaagaaaacattagcagtgtaattaatttaccagtgatccccaagatgaaataccagattctcctatgggaaattactgtgctgtcttctgtatgacttatggtcaaataagtctcaaattcatttctctggatagatctttatatgctagtcattggtgattttgatgagtcaatttacagactgtaatcttctaaaaattctgaaagactaattgttttctgtgccatataaatgcataccactgagcaaatgaaccttattctcagcaggaacaactagcatacatgttctgaattctaacagtgctaaattacattcaagtccaggaagatcacctggaattaatggcatttcagttggcaggcatcattcccacccctcggtcttaggaaaaggaggtagaagccccagaaccacacggcagagatcagcaagttttgtctcaagtcagacaaggtctaggtggccttggccttatgcaaagtgggtgacatatttgattatatttccctttacctccatagtagtcaggccagcagcatggactgcaagaacctaagggagcaacatacttagctgcaaagtgagcaaatgaattgagcctaggaatatgtgatgaaaatgcatggctgatgtttcctgatctccaaggagactcccatttgctgaagttttgcatgctaagaaatcaactacagcagaaaatacaagaatacctttaagttgattattggcaatcttattcatatattagcaagaaaaagggagagatgcttactggtggatgctatagagtcctctgtttttaaaagtaccatggccgggtgcagtggctcacgcctgtaatcccagcactttgggaggccagggcaggcgaatcatgaggtcaggagttcgagaccagcctggccaatatggtgaaaccctgtctctactaaaaatacaaaaattagctgggtgcagtggcaggcgcctgtaatcccagctactccggaggttgaagcaggaaaattgcttgaacctgggaggtggaggttgcagtgagccaagttcgtgccactccactccagcctgggtgacagagcaagactctgtctcgaaaaagaaaaaaaaccatgaaggatgagtactagagtcagtaatagaagtagttcagcattatttaactacaacacaatgctgcaaatatttcacagtaattatcaaaatttaatgggctctaatttaaaatgttatttaataagtatagattttaattgagaattatctttgagtagatgtaatcacaaagtgcattaactcttgttggaatattttatggctattccaaagtatagagtgcctaaattttgtgttgaaaatgtctttcatgacggtattaagttttctgaaattacacatggcttttaaaatttctaatgtatccaagatgtgcaatgttgttaggatctcattcttcagtgcatgaaaagctactaccctcagaacattttgtgttaattgtacctgcaagaacacctcaggcaagccaagaagaaatgaaacccaaataaaacttgaaaatgcaccttaaaaatatatatacatataatagttttgaaatgggattctgctttattttgatggaatggccattaaatacacattttgagataatacattgttgtggtgtttctttatacattatccttttaggtcgtgctagtaaaagtatattgatgaaggaattatgatgctttatacttcttactgcactaaattgatagaactagtacttgtcataatcggttctgtctccgctcacatgactaatacgtaattgcctttccaaaaagatatttttgcctcagaacttactgacaagctgagaggctatgaagatggaaatttgtgaaagaagtagtgctcttatatttggcctcatcatttgggccatttcagtatagtaatgatatcactaatcggaattagcatgagagggaagtaagccaggaagaataaaactgctgaatgtttgtatgtgtaagatatttccaaagattctaaataaatgtagttgcctacagagcaaa

SEQ ID NO: 6685 - DNA, 5349 bp, Homo Sapiens
  NM_176878
ctcacttccgcccaggtgaggcagggccgacaccgagcccgcccgacccgggctcccacctgctcctccagcgcaccaggtgtctttaagagtgattgaagagaataattcaaaatgcctgaaaatcctgctacagataaactgcaggtgctgcaggtacttgatcgcctgaaaatgaaattgcaggagaagggtgacacgtcgcagaatgagaagttatctatgttttatgagacactaaagagtcctctcttcaaccagatactcacacttcagcagtccatcaagcaactgaagggtcaactcaaccatataccctcagattgttcagccaactttgatttttctaggaaaggtttgttagtgttcacagatggttccattactaatggaaatgtccacaggccctctaataactcgactgtatctgggttatttccgtggaccccgaagttgggaaatgaagactttaactcagtcattcaacagatggctcagggccggcaaattgaatatatagatatagaacggccttcaactggaggccttggattcagtgtggtggccctcagaagtcaaaatctcggaaaagttgatatcttcgtgaaggatgtccagccagggagtgtagcagacagggatcaaagattaaaggaaaatgatcaaatattggccattaatcacacgccattggatcagaacatttcccatcagcaagcaattgcattattacaacaaaccactggatctttgagactgattgtggccagggaaccagtccacacaaaaagcagtacttctagcagcctaaatgatacaactctgcctgaaacagtttgttggggccatgttgaagaggttgagctcattaatgatggctctggactaggttttggaatagttggaggaaaaacaagtggcgtggttgtgaggactatagttcctggaggattagcagatcgagatggaagactccagacaggggaccacatcttgaagattggtggcacaaacgtgcagggaatgaccagtgagcaagttgcacaagttctaaggaactgtgggaattcagtcaggatgctcgttgctagagatccagctggtgacatttcagtcaccccccctgcccctgcagccttacctgttgccctgcctactgtagccagcaagggccctggttctgacagttctctttttgaaacttataatgttgagcttgtgagaaaagatgggcagagtcttggaattagaattgttggctatgttggaacatctcatacaggggaagcttcagggatttatgtgaaaagtataatacctggcagtgctgcgtaccacaatggccacattcaagtgaatgacaaaatagttgctgtcgatggcgtgaacattcagggttttgccaaccatgatgttgttgaagtattacgaaatgcagggcaggtggtacacctaaccctagttcgaaggaagacatcctcatctacttctccacttgaaccaccttcagacagaggaactgttgtagaaccactgaaaccaccagctctctttctaactggagcagtggaaactgaaactaatgtggatggtgaagatgaggaaattaaagaaagaattgatactttaaaaaatgacaacatacaagccttagaaaaattggaaaaagtcccagactctccagaaaatgagctgaaatccagatgggaaaacctgttgggtcctgattatgaagtaatggttgctactttggacacacagattgcagatgatgctgagttacagaaatattcaaagctgctgcctattcacactctgaggcttggtgtggaagtggattcctttgatgggcaccattatatttcttcaattgtttctggtggtcctgttgatacattgggtctcctacagccagaagatgagctgcttgaggtcaatggcatgcagctttatggaaaatctcgccgagaagcagtctcctttcttaaagaagtgccacccccttttactttggtttgctgtcggaggttgtttgatgatgaagcttctgtagatgaaccaaggcgcactgaaacctctcttcctgagacagaggttgaccacaatatggatgtcaatactgaagaagatgatgatggggaattagcactgtggtcccctgaagtcaagattgttgaactagtaaaagattgtaaaggtttgggattcagcattttggattaccaggaccctttagatcctacaagatcagtgattgtgatccgctccctggtagcagatggtgtagcagaaagaagtgggggactattacctggagaccgcctggtctcagtcaatgaatactgtttggacaacacctcacttgctgaagctgtggaaatattgaaagctgtgccaccaggcctagtacaccttggcatctgtaagcctttggtggaagataatgaagaagaaagttgttatattttacattcaagcagtaatgaagacaagactgaattttcaggaacaattcatgatataaattcatctttaatactcgaagcacccaagggatttagagatgaaccatattttaaagaagaacttgtggatgaaccatttctagatctgggaaagtctttccattcccaacaaaaagagatagagcaaagcaaggaggcctgggagatgcatgaatttctgactcctagattgcaggaaatggatgaagaaagagaaatgcttgttgatgaagaatatgagttatatcaagatccctcaccatccatggagttgtatcccttgtcgcacattcaagaggccactcctgtgccctctgtgaatgaacttcactttggtacacagtggttgcatgataatgaaccatccgagtctcaagaggcaagaaccgggaggactgtctattcccaggaggcacagccgtatggctattgccctgaaaatgtgatgaaagaaaattttgtcatggagtccctaccatctgtaccatcaactgaaggaaacagtcaacaaggcagatttgacgacctggaaaatcttaattcattagcaaaaactagtctggatttaggcatgatcccgaatgatgtccaaggtcctagcttgctcattgaccttcctgttgtggctcaaaggagggagcaagaagatttgcctttatatcaacaccaagcgacacgagttatttccaaggcctcagcatacacaggaatgttgtcttctagatatgccactgatacatgtgagttacctgagagagaagaaggcgaaggagaagaaactccaaattttagccactggggtccaccgagaattgttgagatttttagagaacccaatgtgtctcttgggatcagtattgttggtggacaaactgttataaaacgtctaaagaatggagaggagcttaaaggtatattcatcaaacaagttttagaagacagtccagcagggaagacgaacgcacttaaaactggagataaaatacttgaggtgtctggagtagatttgcagaatgcctcacacagcgaagcagttgaggccattaagaatgcaggaaaccctgtggtgttcattgttcagagtttgtcatccactccacgagtcattcctaacgtacataacaaggccaacaaaatcaccggtaaccagaaccaggacacccaagaaaagaaagaaaagaggcaaggaactgctccaccgccaatgaaacttcctcctccttataaagctctgactgatgacagtgatgaaaatgaagaagaagatgcctttaccgaccaaaaaatcagacaaagatatgcagatctgcctggagaactgcacattattgaacttgaaaaagataagaatggacttggactcagccttgctggtaataaagaccgatcacgcatgagcatatttgtggtgggaattaacccggaaggacctgctgccgcagatggacgaatgcgtattggagatgaactcttagagataaacaatcagattctgtatggaagaagtcaccaaaatgcatctgccattattaagactgccccatcaaaggtcaagctggttttcatcagaaacgaggatgcagtcaatcagatggccgttactccctttccagtgccatcaagttctccatcttctattgaggatcagagcggcaccgaacctattagtagtgaggaagatggcagcgtcgaagttggtattaaacaattgcctgaaagtgaaagcttcaaactggctgtcagccagatgaaacagcaaaaatatccaacaaaagtctccttcagttcacaagagataccattagcaccagcttcatcataccattcaacagatgcagacttcacaggctatggtggtttccaggctcctctgtcagtggaccccgcaacgtgtcccattgtccctggacaggaaatgattatagaaatatccaagggacgttcagggcttggtctcagcattgtgggaggaaaagacacacccttggttaatggggttgacctgaggaactccagccacgaagaagccatcacagccctgaggcagaccccccagaaggtgcggctggtggtgtatagagatgaggcacactaccgggatgaggagaacttggagattttccctgtggatctgcagaagaaagctggccggggcctgggcctgagcatcgttgggaaacggtaaagacgtgctgtgggagttgggatctgcctttttcatccagagctctgatgcctgtgaacactgaaagagaaagcctaatgtaaagtagtgatgggatttctaaaaataagatatttatgaaaatttgacaacatgggtcatatttctgagcaaggtcttaccagaaaaattgtcatatcaagatagaactccaagtccaatcaatccagactgatatatttctgtacagagtaagaacaactagcaaggttctttcacttggaattactaagatcggagttttgcagaggttgattaaagcaaccatacccaagaaatagctagcatcaagaatgagatttatccaatgttgggtcaagaacattgcttcgacatggaaattaacatggaacattgcttttcgtgatactgttaatttcatactatgttgaaactagttgagtagacatagttaagagataaacataattcttcacgatagtagttttctattaagaaaaatgtcctgctgggcacagtggcatgtacctgttgtctcagctatgtgggaagatcacttgaggccaggagttcaaggctatagtgtgctatgatcatgcctgtgaatagccactgcacttgagcctcttgggaaacataacaagaccccatctgtaaatt

SEQ ID NO: 6686 - DNA, 1316 bp, Homo Sapiens
  NM_176880
atgcgccaagcccacgcggttccgggtcccaagatttggctccaagagctattcgcagagaaacagcctcgcacaaaaagccaccgcccccgaaacccgcgggaaatctgtttcctgtgaaaggcctggcctccgggcattggcggtttccctgatcctctctcccaaattttccggcaggggattgatcgaggcgacatttaggactggggtgggcgagggagtggcggttctcgtcccaagttacaggtgaggacgttcaggccaaggcgtagccaagatcgcgccgccctgtagcttgaggaggcgccgggattcgaaccaaggctgtgcccaatcctaagccctgcgaggtcttgtggaaccgacatgacccactctttggtttgtccagagacagtgagcagggtgagttcagtgctgaatcgcaacactcggcagtttggaaaaaaacatcttttcgaccaggatgaggagacatgttggaactcagaccagggcccctcccagtgggtgacgctggagtttccccagctcatccgtgtctcccagctgcagatccagtttcagggtggcttctccagtcgccggggctgcctggaaggttcacagggcactcaggctctccacaagattgtagatttctaccctgaggacaacaactcgcttcagactttccccataccagctgctgaagtggaccggctgaaggtgacgtttgaggatgccactgacttttttggccgtgtggtcatctaccacctgcgggtgcttggggagaaggtgtgagacctctaggggctgtctcctccaggaagccctccgggaagcacagcaaagtccctcattctgcacagaaggtttattggttcctcttgggaagggtcccctcccaccacctgtccagaagctgcctttgaagtcagttctgggtttccccagctctggctgaccattttgttccctgagtgtctgagtccccggcaggcggccttcactcagggtcagcgggcaccaggttgctctggaagagcttgaggatgtggttctcgatcacctgttgcactgagatggggcagggaaaaggtgggctgtgagcttgaatcgggagtggggtggaggcacaggccaacctgcgctctccccttaggggacaaacagggacccttgcagagacctgcattacagagcaaagctgggagaaccgaggactcaccccaggaacctcaacttcccctaagtttgtaaaaatgcacttttgtagcttttcagaattaatataaaaatatttcctaccaaaaaaaaaaaaaaaaaaa

SEQ ID NO: 6687 - DNA, 2769 bp, Homo Sapiens
  NM_176894
gctcatttgtaggctgaactaatgactgccgccataagaagacagagagaactgagtatcctcccaaaggtgacactggaagcaatgaacaccacagtgatgcaaggcttcaacagatctgagcggtgccccagagacactcggatagtacagctggtattcccagccctctacacagtggttttcttgaccggcatcctgctgaatactttggctctgtgggtgtttgttcacatccccagctcctccaccttcatcatctacctcaaaaacactttggtggccgacttgataatgacactcatgcttcctttcaaaatcctctctgactcacacctggcaccctggcagctcagagcttttgtgtgtcgtttttcttcggtgatattttatgagaccatgtatgtgggcatcgtgctgttagggctcatagcctttgacagattcctcaagatcatcagacctttgagaaatatttttctaaaaaaacctgtttttgcaaaaacggtctcaatcttcatctggttctttttgttcttcatctccctgccaaatacgatcttgagcaacaaggaagcaacaccatcgtctgtgaaaaagtgtgcttccttaaaggggcctctggggctgaaatggcatcaaatggtaaataacatatgccagtttattttctggactgtttttatcctaatgcttgtgttttatgtggttattgcaaaaaaagtatatgattcttatagaaagtccaaaagtaaggacagaaaaaacaacaaaaagctggaaggcaaagtatttgttgtcgtggctgtcttctttgtgtgttttgctccatttcattttgccagagttccatatactcacagtcaaaccaacaataagactgactgtagactgcaaaatcaactgtttattgctaaagaaacaactctctttttggcagcaactaacatttgtatggatcccttaatatacatattcttatgtaaaaaattcacagaaaagctaccatgtatgcaagggagaaagaccacagcatcaagccaagaaaatcatagcagtcagacagacaacataaccttaggctgacaactgtacatagggttaacttctatttattgatgagacttccgtagataatgtggaaatcaaatttaaccaagaaaaaaagattggaacaaatgctctcttacattttattatcctcgtgtacagaaaagattatataaaatttaaatccacatagatctattcataagctgaatgaaccattactaagagaatgcaacaggatacaaatggccactagaggtcattatttctttctttctttttttttttttttaatttcaagagcatttcactttaacattttggaaaagactaaggagaaacgtatatccctacaaacctcccctccaaacaccttctcacattcttttccacaattcacataacactactgcttttgtgccccttaaatgtagatatgtgctgaaagaaaaaaaaaacgcccaactcttgaagtccattgctgaaaactgcagccaggggttgaaagggatgcagacttgaagagtctgaggaactgaagtgggtcagcaagacctctgaaatcctgggtaaaggattttctccttacaattacaaacagcctctttcacattacaataatataccataggaggcacaagcaccattattaagccactttgcttacaccttaagtgtgtacaattcaagtgtgagaatgctgtgttaactattctttggaattctccttctgtccagcaaatactctaatgatggttaaacatggcacctactcagcaatgccttcctggaccacaacccctatccccctgccccaccctcctcattaaaaacaaatacttctactgtttgggtgtgtgatagggttctcaatgcagatctcccttttctagttagctatattcttgactgcatccgctaaaaatgttaaagcttcttgagagacagacatgccagattttcttggtatctcccataatacgacctacagtccatggtctacagatgttttaaatagaattgctattctcgatacatacaaagacgtaattgctgacccacaatcagtaacatccatattgagagatttttcaaaggatggtgaccctgcttgtatttatttaccttggtattttttcttgcatccttctgtgattcaaaaaagtaaaatgtggctttctgaaatgatggataagagtctacatcttctagaaaaaatacataaaggagtagttaagctctgtaaatgtgccacgagctccaacacgaccatcgtagggtgaagcccacgttttcttccatggcctcaaaggccctagaacttgcctacctttctggccttacctcctagctacttatccatctcttgaactttatactcttgtataaatttctaactttcagaaaatgccatactctgttttggcaccacacatgtatatttccccctggtacacttggaagactcttatccatctgtgaaaccctatgttgtcatcacttggtccatgaaatattacctggccaatatcccaccatcacctcaaacccaatcaccccctcctctgtatgctgtcacacctatattattaaacttatcacattgcattgtaattacttcctgacctttgtatctactcttttagtaactgatgtatatatctgaaaggagagattgtttcattgtgcaatcaataaatgtttgataaaataaagccc

SEQ ID NO: 6688 - DNA, 1641 bp, Homo Sapiens
  NM_176895
tcagcgggaggggctggaccccgcgttcctcctccctgccggtccccatccttaaagcgagagtctggacgccccgcctgtgggagagagcgccgggatccggacggggagcaaccggggcaggccgtgccggctgaggaggtcctgaggctacagagctgccgcggctggcacacgagcgcctcggcactaaccgagtgttcgcgggggctgtgaggggagggccccgggcgccattgctggcggtgggagcgccgcccggtctcagcccgccctcggctgctctcctcctccggctgggaggggccgtagctcggggccgtcgccagccccggcccgggctcgagaatcaagggcctcggccgccgtcccgcagctcagtccatcgcccttgccgggcagcccgggcagagaccatgtttgacaagacgcggctgccgtacgtggccctcgatgtgctctgcgtgttgctggcttccatgcctatggctgttctaaaattgggccaaatatatccatttcagagaggctttttctgtaaagacaacagcatcaactatccgtaccatgacagtaccgtcacatccactgtcctcatcctagtgggggttggcttgcccatttcctctattattcttggagaaaccctgtctgtttactgtaaccttttgcactcaaattcctttatcaggaataactacatagccactatttacaaagccattggaacctttttatttggtgcagctgctagtcagtccctgactgacattgccaagtattcaataggcagactgcggcctcacttcttggatgtttgtgatccagattggtcaaaaatcaactgcagcgatggttacattgaatactacatatgtcgagggaatgcagaaagagttaaggaaggcaggttgtccttctattcaggccactcttcgttttccatgtactgcatgctgtttgtggcactttatcttcaagccaggatgaagggagactgggcaagactcttacgccccacactgcaatttggtcttgttgccgtatccatttatgtgggcctttctcgagtttctgattataaacaccactggagcgatgtgttgactggactcattcagggagctctggttgcaatattagttgctgtatatgtatcggatttcttcaaagaaagaacttcttttaaagaaagaaaagaggaggactctcatacaactctgcatgaaacaccaacaactgggaatcactatccgagcaatcaccagccttgaaaggcagcagggtgcccaggtgaagctggcctgttttctaaaggaaaatgattgccacaaggcaagaggatgcatctttcttcctggtgtacaagcctttaaagacttctgctgctgctatgcctcttggatgcacactttgtgtgtacatagttacctttaactcagtggttatctaatagctctaaactcattaaaaaaactccaagccttccaccaaaacagtgccccacctgtatacatttttattaaaaaaatgtaatgcttatgtataaacatgtatgtaatatgctttctatgaatgatgtttgatttaaatataatacatattaaaatgtatgggagaaccaaaaaaaaaaaaaaaaaa

SEQ ID NO: 6689 - DNA, 3071 bp, Homo Sapiens
  NM_177405
gtcctaatagccacgcccacctcaaatggcgatcccagagagcatctggcttcaattttcctttttccggaggggagatggattccctggaatggaactgggctctggtgtatgagctcagtggagagcaccatgacgaagagtggtcagtgaagacttaccaggaagtagctcagaagtttgtggaaactcaccctgagtttattggaatcaaaatcatttattcggatcacagatccaaagatgtggctgtcatcgcagaatccatccgaatggccatggggctccgaatcaagttccccacggtggtggcagggtttgacctggtggggcatgaggacactggccactccttgcatgactacaaggaagctctgatgatccccgccaaggatggcgttaagctgccttacttcttccacgccggagaaacagactggcagggtacttccatagacaggaacattctggatgctctgatgctgaacactaccagaatcggccatggatttgctttgagcaaacaccccgcagtcaggacttactcctggaaaaaggacatccccatagaagtctgtcccatctctaaccaggtgctgaaactggtgtctgacttgaggaaccaccctgtagccactctgatggccactgggcaccccatggtgatcagctctgatgacccagctatgtttggtgccaaaggcttgtcctatgatttctatgaggtcttcatgggcattggggggatgaaggctgacctgaggaccctcaaacagctggccatgaactctatcaagtacagtaccctgttggagagtgagaaaaatactttcatggaaatctggaagaagagatgggataagttcatagcagatgtggctacaaagtgaggagaagctagccagccctctacaagctgtcttcttgcacacgctgtcacttcctctcactcgttcttgaatcagctccatgtgcccatgaaatcaatggcctctgtatggagcgaccctgtgagaagcacttggctggctgagcaaattcatcctctggaaatattctctctcagccacagtgacattgaccctcttggttttctcctgtctctggccatttcttccagtttccctatttcagagtcttctcctctctctgatctctgtgctgtttcctcaggactcagtcctgggctctcttctattctggtctctttatttttttatttttgtattttttcgagatggagttttgctcttgttgcccaggctggagtacaatggtgcgatctcagctcagtgcaacctccgccacccgggttcaggcaattctcttgcatcagcctcgcgagtagttggaattataggcatgtgccaccacacccagctgatttttgcatttttagtagagacaggttttcaccatgttggcgaggctggtatccaactcttgacctcaggtgatccactcgccccttggctcccaaagtgctggaattacaggcattagccaccatgcctggcctattctggtctctttaactctctcctctttatttctcttctctctctgtacacttttcctgggtggtctcatccattcctttgctttttcataccatttatttgttaatgattcccacatttatttatgcacttggagagctcacaggaatctcagaaactgatgaggtacaattctgaaccctcagtctcttccctttaaacctttctttttctctactttaatttttctaaagagtgtcttgctatgttgcccaggctggtctccaactcaagtgatcctcctgccgcagtctcccgaagtgctgggattactgacatgagccaccacactcagccctttaaacctttccctggcctttcccatagctggtgaaggacacctccatccattccacgcagttgctcaaagcagaaattttcagtgcaagtcttgatgctgcgccgtcccccactccctacatcagaacgcatccctcatctggactccagcggtggcttcttgatgctgcgcggtcccccactccctacatcagaatgcatcccgcatccagactccagcggtggtgctctacctgcacgctgttgccaagtccaagctaccatactcctgcctgagctatgacaacagcctcctcactgatctcccctttcttccctttgcctcctccagctcatttttcacagtgtagaatgacattttgtttgtttgttttgttttgtttgagatggagtctcgctctgttgcccagggtggagtgcagcggtgcgatctcggctcactgcaacctccacctcccgggttcaagcggattctcgtgcctcagcctcctgagtagctgggattacaggcatgcaccaccatgcccggataatttttgtatttttagtagagatggggtttcactatgttggccaggctggtctcgaacacctgacctcgtggtccacccgcctcggcctcccaaagcactgggattacaggcgtgagccacccggcctggcctagaatgacttttaaaagatcaaattaaatcaggtcactcctttgcttacaacgcagtgcgtttagaggtacaccccatgtctccacagggcatacagcatccgatttaatctggatccattccggcgccttcctctcccagtcacccagagggccccaaccccggcggccctttcttcctcaaatgtcctcggctctataccgtgcctgggtcttttctctttctctctgcctggaagattccttctttccccttttgtcttgcccactcctgtttacccttcaagtttcaagttcatgtcactgtctcagagaggttttcctgtgctcgccctgtttctctcaggaagccttgctcttttccatcatgcctctaatcacagcttataatcggatatttatttctgtgtctacagtcttgccctgccagactgtatgccccatgtgggcaggcgctcatgattgtttctgattgtttcacgcatgctgctaacccagagcctgggcccaaagctagttagtactcaataaacaatgcattgaatgag

SEQ ID NO: 6690 - DNA, 3320 bp, Homo Sapiens
  NM_177422
acttccggacgggactcccctctgtccgcgcctcacatctccccttcctctcgcctagtcctgtgccgttttccgtccgcgactcttccggcccagagctttcggagtgcggttgctcaggggaagccgtcgccgcccccgcctcggggccgagtgagagtgcccgtcgcgtcgcgccgcgtcgccccccgggccgcctccttgccgccagtggcgggctccgttctccctcgaagcactccccccagctccatgaatggaaatcggctccgcaggacccgctggggcccagcccctactcatggtgcccagaagacctggctatggcaccatgggcaaacccattaaactgctggctaactgttttcaagttgaaatcccaaagattgatgtctacctctatgaggtagatattaaaccagacaagtgtcctaggagagtgaacaggtagatttagacgttactttacctggggaaggtggaaaagatcgacctttcaaggtgtcaatcaaatttgtctctcgggtgagttggcacctactgcatgaagtactgacaggacggaccttgcctgagccactggaattagacaagccaatcagcactaaccctgtccatgccgttgatgtggtgctacgacatctgccctccatgaatttctgccactgccttctacaaagcacaacctgtaattcagttcatgtgtgaagttcttgatattcataatattgatgagcaaccaagacctctgactgattctcatcgggtaaaattcaccaaagagataaaaggtttgaaggttgaagtgactcattgtggaacaatgagacggaaataccgtgtttgtaatgtaacaaggaggcctgccagtcatcaaacctttcctttacagttagaaaacggccaaactgtggagagaacagtagcgcagtatttcagagaaaagtatactcttcagctgaagtacccgcaccttccctgtctgcaagtcgggcaggaacagaaacacacctacctgccactagaagtctgtaatattgtggcagggcaacgatgtatcaagaagctaacagacaatcagacttccactatgatcaaggcaacagcaagatctgcaccagatagacaagaggaaattagcagattggtaagaagtgcaaattatgaaacagatccatttgttcaggagtttcaatttaaagttcgggatgaaatggctcatgtaactggacgcgtacttccagcacctatgctccagtatggaggacggaatcggacagtagcaacaccgagccatggagtatgggacatgcgagggaaacaattccacacaggagttgaaatcaaaatgtgggctatcgcttgttttgccacacagaggcagtgcagagaagaaatattgaagggtttcacagaccagctgcgtaagatttctaaggatgcagggatgcccatccagggccagccatgcttctgcaaatatgcacagggggcagacagcgtagagcccatgttccggcatctcaagaacacatattctggcctacagcttattatcgtcatcctgccggggaagacaccagtgtatgcggaagtgaaacgtgtaggagacacacttttgggtatggctacacaatgtgttcaagtcaagaatgtaataaaaacatctcctcaaactctgtcaaacttgtgcctaaagataaatgttaaactcggagggatcaataatattcttgtacctcatcaaagaccttctgtgttccagcaaccagtgatctttttgggagccgatgtcactcatccacctgctggtgatggaaagaagccttctattgctgctgttgtaggtagtatggatgcacacccaagcagatactgtgccacagtaagagttcagagaccccgacaggagatcatccaggacttggcctccatggtccgggaacttcttattcaattttataagtcaactcggttcaagcctactcgtatcatcttttatcgggatggtgtttcagaggggcagtttaggcaggtattatattatgaactactagcaattcgagaagcctgcatcagtttggagaaagactatcaacctggaataacctacattgtagttcagaagagacatcacactcgattattttgtgctgataggacagaaagggttggaagaagtggcaatatcccagctggaacaacagttgatacagacattacacacccatatgagttcgatttttacctctgtagccatgctggaatacagggtaccagtcgtccttcacactatcatgttttatgggatgataactgctttactgcagatgaacttcagctgctaacttaccagctctgccacacttacgtacgctgtacacgatctgtttctatacctgcaccagcgtattatgctcacctggtagcatttagagccagatatcatcttgtggacaaagaacatgacagtgctgaaggaagtcacgtttcaggacaaagcaatgggcgagatccacaagctcttgccaaggctgtacagattcaccaagataccttacgcacaatgtacttcgcttaaatagtccaagtatattctctgagaggaagtactgaaagatgaattgacatacaacgtatgtttccagtgaagtcaattgagtaaggacacctccagccatacagaaaccaacactgtgtgggggccaaggtctgatccttatgttaatacaaggaagattgtttacttcatcaaggaacacagcatcattatgcaatatgaaaccagccaactgctttttgtgcggtctcctataggaagtatcgcaattgttttgttttcatttcttgtagtctaacccttttaatgcctttacctcaagttgcttggcagcacaactatctttgcaaaaaaaagtaaagaaaaagtaaatgatggtttaaaaaatacacaccttcatgaataatcaaagtgatttttcagaattatgtgtgcaaaaaattaatgtgcattcatatattcttgtaaaaggtgtctgtgtatttttaaaatatatacatccatacttcatatgcatatatatctagatctggattgataatagatatatatgtgtctgttatatattttagagttcattccattggggaattttctttcccttttattctacccccactaccgcctttatttctctatttcccttgccttcatcacctacatttttttcccagtcctaccagtgacattcaaatgttgatgtatctggttcgtttgaatataaaatatggcaaactaaaaaaaaaaaaaaaaaaaaaaa

SEQ ID NO: 6691 - DNA, 2375 bp, Homo Sapiens
  NM_177436
tcaggctcgctgtcgcgccattttgccggggtttgaatgtgaggcggagcggcggcaggagcgggtagtgccagctacggtccgcggctggggttccctcctccgtttctgtatccccacgagatcctatagcaatggaactcagcgatgcaaatctgcaaacactaacagaatatttaaagaaaacacttgatcctgatcctgccatccgacgtccagctgagaaatttcttgaatctgttgaaggaaatcagaattatccactgttgcttttgacattactggagaagtcccaggataatgttatcaaagtatgtgcttcagtaacattcaaaaactatattaaaaggaactggagaattgttgaagatgaaccaaacaaaatttgtgaagccgatcgagtggccattaaagccaacatagtgcacttgatgcttagcagcccagagcaaattcagaagcagttaagtgatgcaattagcattattggcagagaagattttccacagaaatggcctgacttgctgacagaaatggtgaatcgctttcagagtggagatttccatgttattaatggagtcctccgtacagcacattcattatttaaaagataccgtcatgaatttaagtcaaacgagttatggactgaaattaagcttgttctggatgcctttgctttgcctttgactaatctttttaaggtatggaatgcatcttggtgatatttttaaattaatattttaaattgcttgaatgtttgtatacatgttaagagaatgctttgaaagcttatttgatagataatgtttagagcatttcttttgaaaaatttcaaacctacacagaaatagagatgctatagtgaactcccatctattattacacaaatttaatggttagcaacgttttattttctctgttccctttcttaggaatgttataaaagcaaatcccaagcatcatatcatttcacccaagtattttaaagtatgtgtctctaaaggaagaaatacatatttttatttgactatgtttggagtttaattaattatatatttatacattattttacagtttacaggatactttcctgaatgtgttcttggtgtttgtgaaaatcctataagatttaaagaaatatatatatactttttttcttttttcttttttaaagacagggtctcactctcattgcccaggctggagtgcagtgagctattacagtgccactgcaatccagcctgggcaacagagcgaggtcccgtttcttaaaaaacatatatgtgtgtggcgtgtgtatatatatgtatatatattttttcattgtattattacggagactttcaaacatatatagaaagagcataatgaagcctgcatgtgcccagcttcaataattaccaatatcttgccagttttgtttcgtttctccttttattctctgtattgagcaagtcttagacatcatacgtttcacgcgtaagtaccttattctacatcattaaccagtaaggactttttaattaaccacaataccactatcacacctaataatagtaattccttatggatcttttctttagacctatttttgaaggcataaaagcagttgagtttctggagaatttttggatggtgattaatgacttgactggctgctcttcccagagctgtggcagctctcccgtagaagatggggtttgtattggcgcaccaagatctccaacagccagtgtgtgtttcccatctcttgtaggttccatcaatggtgagcaccagcctgaatgcagaagcgctccagtatctccaagggtaccttcaggcagccagtgtgacactgctttaaactgcatttttctaatgggctaaacccagatggtttcctaggaaatcacaggcttctgagcacagctgcattaaaacaaaggaagttctccttttgaacttgtcacgaattccatcttgtaaaggatattaaatgttgctttaacctgaaccttgagcaaattagttggtttgtgtgatcatacagttatgtgggtggcttctagtttgcaacttcaagggacaagtattaatagttcagtgtatggcgttggtttgtgttgagcgtttgcacggtttggataatcttaaattttgacggacactgtggagactttctgttactaaatccttttgttttgaagctgttgctatttgtatttctcttgtcctttatattttttgtctgtttatttacgcttttattggaaatgtgaataagtaaagaattacttgtgttacttgccaagcagtgcacatttcatagtttcaaatctgtaatcagcaataaaaatcctaaaatatgtacctaaaaaaaaaaaaaaaaaaaa

SEQ ID NO: 6692 - DNA, 888 bp, Homo Sapiens
  NM_177533
ggagcatgctcagagccgcggtcacgcgcccgcccgaaggctcctgtcgggacagggcgccgccccgtgtcggcccccgcagagctcgcggcccccgcctgtccgggcgccgccatggagcgcatcgagggggcgtccgtgggccgctgcgccgcctcaccctacctgcggccgctcacgctgcattaccgccagaatggtgcccagaagtcctgggacttcatgaagacgcatgacagcgtgaccgttctcttattcaactcttctcggaggagcctggtgttggtgaagcagttccggccagctgtgtatgcgggtgaggtggagcgccgcttcccagggtccctagcagctgtagaccaggacgggcctcgggagctacagccagccctgcccggctcagcgggggtgacagttgagctgtgtgccggcctcgtggaccagcctgggctctcgctggaggaagtggcttgcaaggaggcttgggaggagtgtggctaccacttggccccctctgatctgcgccgggtcgccacatactggtctggagtgggactgactggctccagacagaccatgttctacacagaggtgacagatgcccagcgtagcggtccaggtgggggcctggtggaggagggtgagctcattgaggtggtgcacctgcccctggaaggcgcccaggcctttgcagacgacccggacatccccaagaccctcggcgtcatctttggtgtctcatggttcctcagccaggtggcccccaacctggatctccagtgagactccagggttctagacagaggccagtcttggccactcaccccacaccccgcggaccccaataaaggcttgcatagctccaaaaaaaaaaaaaataaaaaaaaa

SEQ ID NO: 6693 - DNA, 1239 bp, Homo Sapiens
  NM_177536
ggaggcggtgcaggaagcctccgaccacgcgggctcctgatcgcgggcgcccacagcgcggacatggcgggctggtggccggcgttgtcgcgcacggcccggcgccacccgtggcccaccaacgtgctgctctacgttgctcgagcaacgtagctctacgctctacgagcgtgccgtagctcgctcgtctccgccggggacgtgctgcagcaacggctgcagggccgctaggccgactggcgccagacgcggcgcgtggccacgttggtggtgaccttccacgccaacttcaactacgtgtggctgggcctgctggagcgcgcgctcccgggccgagcgccgcgcgccatgctggccaagttgctgtgcgaccaggtggtcggtgcgcccatcgcggtctcggccttctacgccggtatgagcattctccagggaaaggatgacatatttttggacctgaaacagaaattctggaacacctatatggtggtctatgttgcccgcaacgcaaaggatgtggcagtttcctactaccacttctaccacatggccaaggtgcaccctgagcctgggacctgggacagcttcctggagaagttcatggtcggagaagtgtcctacggatcctggtaccagcacgtgcaggagtggtgggagctgagccgcacccaccctgttctctacctcttctatgaagacatgaaggagaacccgaaaagggagattcaaaagatcctggagtttgtggggcgctccctgccagaggagaccgtggacttcgtggttcagcacacgtcgttcaaggagatgaagaagaaccctatgaccaactacaccaccgtcccccaggagttcatggaccacagcatctcccccttcatgaggaaaggcatggctggggactggaagaccaccttcaccgtggcgcagaatgagcgcttcgatgcggactatgcggagaagatggcaggctgcagcctcagcttccgctctgagctgtgagaggggctcctggagtcactgcagagggagtgtgcgaatcaaacctgaccaagcggctcaagaataaaatatgaattgagggcccgggacggtaggtcatgtctgtaatcccagcaatttggaggctgaggtgggaggatcatttgagcccaggagttcgagaccaacctgggcaacatagtgagattctgttaaaaaaataaaataaaataaaaccaatttttaaaaaaaaaaaaa

SEQ ID NO: 6694 - DNA, 10943 bp, Homo Sapiens
  NM_177538
ttttttttgtagagactggggtctcactatgttgcccacgctggtctcaaactcctgggctcaagcgatcctcccgcttcagcctcccaaggtgctgggattacaggtggagccaccgcgcccggcatcgataatctgaatctctaacgagctcccgggcgacgttgatgcagctggtaccgggaccactcttcgaaaatcatcggtttagaggttttaattctgaatccattgcgaaaactgttgggcggacagagcactactaactcctaacttttctcagaaagctgggctctgctttcgccagcaacccggtccgaagtcgcgggcatattctgtctgaaatcgtgtgcaccgaaatccccgccttgcggtggaggctggcgctaggcggcctcagcctcggcctgctgcgctcaggaacccgcgccccggctcctcggcgatccattgctctttcctctggcgccggccgcaggcctcggtcacgcccccagcggcccgttggtttccgggtcccgcggggtgcccccgcccacacgctatgccttaaattgggccaggctgaggcgctgctgctggagcggccgatccgagacgtggctccctgggcggcagaaccatgttggacttcgcgatcttcgccgttaccttcttgctggcgttggtgggagccgtgctctacctctatccggcttccagacaagctgcaggaattccagggattactccaactgaagaaaaagatggtaatcttccagatattgtgaatagtggaagtttgcatgagttcctggttaatttgcatgagagatatgggcctgtggtctccttctggtttggcaggcgcctcgtggttagtttgggcactgttgatgtactgaagcagcatatcaatcccaataagacatcggacccttttgaaaccatgctgaagtcattattaaggtatcaatctggtggtggcagtgtgagtgaaaaccacatgaggaaaaaattgtatgaaaatggtgtgactgattctctgaagagtaactttgccctcctcctaaagctttcagaagaattattagataaatggctctcctacccagagacccagcacgtgcccctcagccagcatatgcttggttttgctatgaagtctgttacacagatggtaatgggtagtacatttgaagatgatcaggaagtcattcgcttccagaagaatcatggcacagtttggtctgagattggaaaaggctttctagatgggtcacttgataaaaacatgactcggaaaaaacaatatgaagatgccctcatgcaactggagtctgttttaaggaacatcataaaagaacgaaaaggaaggaacttcagtcaacatattttcattgactccttagtacaagggaaccttaatgaccaacagatcctagaagacagtatgatattttctctggccagttgcataataactgcaaaattgtgtacctgggcaatctgttttttaaccacctctgaagaagttcaaaaaaaattatatgaagagataaaccaagtttttggaaatggtcctgttactccagagaaaattgagcagctcagatattgtcagcatgtgctttgtgaaactgttcgaactgccaaactgactccagtttctgcccagcttcaagatattgaaggaaaaattgaccgatttattattcctagagagaccctcgtcctttatgcccttggtgtggtacttcaggatcctaatacttggccatctccacacaagtttgatccagatcggtttgatgatgaattagtaatgaaaactttttcctcacttggattctcaggcacacaggagtgtccagagttgaggtttgcatatatggtgaccacagtacttcttagtgtattggtgaagagactgcacctactttctgtggagggacaggttattgaaacaaagtatgaactggtaacatcatcaagggaagaagcttggatcactgtctcaaagagatattaaaattttatacatttaaaatcattgttaaattgattgaggaaaacaaccatttaaaaaaaatctatgttgaatccttttataaaccagtatcactttgtaatataaacacctatttgtacttaattttgtaaatttggatttttatatatcatattttcttaattcattgtacacatttgacttactgcacagtatattgatcattttaatgggaaactttagctttctactttttatttttgttttttcactttctatgccattatttttgtattctttttcttagtgtgagctctaaaatcaatgttcttgaaaaagaaattattttgcagaagttggggaatcatgtttgttgaatatgtataaaatagaaacataggctgggcgcggtggctcacacctgtaatccctacactttgggaggctgaggcaggtggatcacctgaggtccagagtttgagaccagtctggccaacatgatgaaaccccatctctactaaaaatacaaaacattggccgggagtggtggctcatgcctgtaatcccagcactttgggatgctgaggcgggtggatcacctgaggtcaggagtttgcgaccagcctggccaacatgatgaaaccctgtctctactaaaaatacaaaaaaattggctgggtgtggtggcccacacctgtaatcccagcactttgggaggtcgaggcgggtggatcacctgaggtccgaagttcgaggccagcctggccaacaggatgaaaccctgtctctattaaaaatacagaaaattggccgggtgcggtggctcacccctgtaatcccagtactttgggaggctgaggcgggtggagcacctgaggtcaggaattcgagatcagcctggccaacatggtgaaaccccatctctactgaaaaacacacacaaaaaaattagctgggcatggtggcacatgcctgtaatcccagctactcaggaggctgaggcaggagaatcatttgaacctgggaggcggagcttgcagtgagccgagattgcacccctgcactccagcctgggccacagagcaagactctgtctcaagaaaaacaaaaaaaaagataaatggacaaaagacatgaacaaacagcttttataggatagtatggctaacaaacttttagaaaagtgtttagtctcactagtaagtaacaaaatattggggcagggcacagtggctcatgcgtataatcctagaactttggaaggccaaagctggtggattgcttgagcccaggagtttgagaccagcccaggcaacattgggagaccctgcctctacaaatatacaaaaaaattactgggcatggtgacacacacctgtagtcccagctgttctgaaggctgaggtgggaggatcacttgagaccaggagaggtcaaggctgcagtgatctgtgatcacaccactgcactccagcctgggcaacagagcaaaaccctgcctttaaaaaaacaaaaaacaaaaaaggccgggctcggtggctcatgcctataatactttgggaggccgaggcaggtggatcaattgaggtcaggtgttcgagaccagccaggccaacttggtgaaaccccgtctctactaaaaatacaaaaaaaaaaaaaaaaaattagccagatgtggtggtgcacatttgtaatcccagctactcaggaggctgaggcaggataatcgcttgaacctgggaggcagaggttgcagtgagccaagatcgcaccactgcactccagcctgggtgtcgagtgaaactcattctcaaaaaaaaaaaaaaaaggaggtggggagagctatttcaagaatattttaagtaggctgggcacggtagctcatgcctgttatcctaacactttgggaagccgacatgggcagatcacgaggtcaagagatttgagaccatcctggccaacatggtgaaaccccatctctactaaaaatacaaaaaattatctggacatgctggcgtgcgcctgtagtctcagctacttgggaggctgaggcaggagaatcgcttgaacctgggaggcggaggttgcagtgagctgatgttgtgctagtgcactccagcctgggcgacagggctgagaccttgtctcaaaaaaaaaaggagtatcttaagtgtctttcaaaattacactttagcacttataaattttatatataatactttactgatagcattgtatattagtccaacttttttggctacactatttgtgaaggattcctttttttctttaagacagccactgtaggaaatatgccaagtacagatagtgaggaaagaaaggaagaaaaatgataattgtctgcaagtgggcttatttttaacactgctgaatttcatttgtaattttactttcaagaatatactctggtagactgaggcgggaggatcacttgagcccaggagttggaggcttcagtgagctgtgatcacaccactgccctcagccaaacctgagtgataaagtgagaccctatctcttaaaaaaaaaaatccctttgttgttgagttattttatgtcatttattggtaaatacctaacattttagacctagtcattaccagttaacatagaatttaattggatgcagtctgtatttttgaaaaaaaaaattttttttggaataacttaaattctaaaactttggccgggcgtgatggctcatgcctgtaatcccagcactttgggaggccgaggcaggcagatcacctgaggtcaggcgttcaagaccagcctgaccaacatggagaaaccccgtctctactaaaaatacaaaattagccaggcttggtggtgcatgcctgtaataccagctactcgggaggctgaagcaggagaactgcttgaacctgggaggcagaggttgcggtgagccaagatcgcgccattgcactccagcctgggcaacaagagtgaaactccgtctcaaaaaaaaaagaaaaattctaaaactttaagtgaaatttattatcccttcccacttattttctgtggttttgtgtgtatagagcatcttcctttgttacccaagtacctcgaatgggttggaaactggcggtagaaggttagagtagccaattgatatgtaaaccaagtgtcagatcagatgagatgaaagaggtggagtttaaagcaagtgagatatgataaacaatgatgaaagcaaaaatagggcagttgaaccagagtcagccagttggcataactgccaataaatgaggcagtgtagaataactaataatgattggaatcaaggaaaagagagcatagaggaatcagctaaattagtatgttttatccatagttacatgactaacaaatgattaaaaagaagttattctctagataattttttaaataaaagtactgttaatatataaactaagttattcattcactgtttttcttcacagtaagaatgacaaaaatctgtgttctttgtacttatcaagtgactcaaattttggccacttcactgtcactgatggcttatagaatgattctagcaggactcaagttattgaactatcaaatgggtttttaattgatattgaagtaagtaagttttgtagcttttggagtttttaaaaactacttcagtgattttgatttatattctttttgatagttcagaagtgtattgttaaaaaacataagcatggccgggcacagtggctcacacctgtaatcccagctctttgggaggccaaggcgggtaaatcacctgaggttgggagtttgagaccagcctgaccaacatggagaaaccctgtctctaccaaaaatacaaaattagccgggcatgatggagcatccctgtaatcctagctacttgagacgctgaggcaggaaaattgcttgaacccgtgaggcagaggttgcgatgagccgagatcgtgccattgcactccagcctgggcaataagagcaaaactccgtctcagaaaaaaaaaaaaaaaaaaaaaacggccaggcgaggtggctcacacctgtaatcccagcactttgggaggctgaggcgggcagatcacctgaagtcaggagttcaagaccagcctgaccaacatggagaaacttcatctctactaaaaatacaaaattagccgggcgtggtggcacatgcctttaatcccagctactggggaggctgaaacaggagaatcgcttgaacccagtaggggaaggttgtggtgagccaagattgcaccattgcactccagcctgggcaagaagagtgaaactctatccaaaaaaaaaaaaaaaccatacgtacataactttttttctttttcttttctttctttcttttcttttcttttttttttttgaggcacagtcttgctttgttgaccaagctggagtgcattggcatgatcacagcttactgtagcctccacctcctgggctccagcgatctcacctcagcctctagaatagctgggactacatatgcatgccaccatgcccagctgtttttttgtttgcttgtttttggttttgtttttttgagacagggtctccctgcgtcgcccagtcttgtctcaaactcctaggctcaagcgatcctcccacctgggcctcccaaagtgttgagattgcaggtgtgagccacggcacctggtccataaaacatttttttatgaactaaagagctctctcaaacttgtgctaacaaaatttaaggcaatattaattctgtgcatgtgtttgggaaaattaaaaaaacttacatagtgcttatttggcccacaaaagtacagttccattttttatataaatagattctacctaacttataacccctatgtcaaaatttgtttatcttaaaatagtttgtataaaaagtctttactgctttattatgaaataataatgtttattgtagaaaaatctaggaaaacacaaaaatgtcaaactcagttaacagtcatagtttcactatttgaagttaaccactgttaagattcttttttttttttttttttttttgttttgagactgagtcccgctgtctattgcccaggctggagtgccatggcaccatctcggctcactgcaacctctgcttcccaggttcaagtgatcctcccgcctcagcctcccaagtagctgggattgcaaacatgtgccaccacacctggctaatttttgtgtttttagtacagatggggtttcaccatgttggccaggctggcctcgaactcctcaacctcaagtagtctgcccaccttgacctcccaaagtgctgggattacaggcatggggcaccatgcccagccccactgttaagattctaatgtaggccgggcacagtgactcatgcctataactcaagcactttgggagttcaaggcggccagattgcttgagcttttagaagtttgagaccagcctgggcaacgtggcaaaagcttgtttctataaaaaaatataaaaacttagccagccttggtggcaccacctgcagtcccaactattcaggaggctgaggcgagaggatggcttgagctcaggaagtcaaggctacagtgagctgtggtagtgccactgcactccctcatggttgacagagcaagaccctgtctcaaaagattctaatatagatactctttttatgcatatgtaatttatatatattatacaaaatattatttgcatttaacatattctgaaccaatagtcttttctacaagcagaacattagtattcttgtcactctgaatgtaggcacagatttttgtcattctttatcttttttgtgtgtgtgtgacagagtctcactgtcaccaggctggaatgcagtggcgtgatctcggctcactgcaacctctgcctcccaggttcaagcgattctcttgcctcagccttttgagtaactggggttacaggcgcgtgccatcacacccagctcatttttgtatttttagtagagatggggttttaccgtgttggtcaggctggtcctgaactcttgaccttgtgatctgcccaactcagcctcccagagtgctgggattacaagcatgagccaccgcgctcggtccctttctttttatttatttatttattttgagatggagtctcgctgtgtcacccaggctggagtgtggtggcacgatcttggctcactgcaacccctgcctcccaggttcaagcaattctcctgcctcagcctcctgagtagctgagactacgggtatgtgccactacactcagctaatttttgtatttttttttagtagagacagggtttcaccatgttggccaggctggtcttgaactcctaacctcaggtgattcacaccccttggcctcctgaagtgctgggattacaggcatgagccactgtgcccggccatttttttgtgtttttagtggagacaggttttcaccatgttggccagtagtgtatttagttatttaaggagggctcaatcaacaggtttaaatggtgtgctattcataattattgcaaaaataggccgggcctgtaattccagcactttgggaggccaaggcaggtgaatcacttgaggccaggagtttgagatcagcctggccaacgtggtgaaactccatctctactaaaaataccaaaagtagcgggcgtggtgacaggtgcctctaatcccagctactcgggaggctgaggcaggagaatcgcttgaacccaagagtcggaggttgcagtgagccgagatcgcgccattgcactccagtgtgggtgacgagcgaaaatccgtctcaaccaagaaaaaagaaaaaaagaaaaagaaaacttaactggcctttggggcacatgcctgtaatcccagcttcttgggaggctgaggcatgagaaaaaaaataaacctgggaggtggaggttgcagtgagttgagattgtgccactgcactccagcttaggcaataaaacaagactgtctcaaaaaaaaaaaaaaaaaaaacttattgagagaataatataccactaatatttaaagaaatttttggctggtgccgtggctcacacctgtaatcccagcactttgggagtccaaagtgggcgtataacttgaggtcaggagttcaagaacagcctggccaacatggggaaaccgcatctctactaaaaatacaaaaattagtgggtgtggaggcgggcgaatgtaatcccagctagttgagaggctgaggcaggagaatgtctgggaggtggaggttgcagtgtgccgagatcgcaccactgtactccagcctaggtgacagagtgagactccataggtctcagccagactctggaggtctcagcccaggcttgagtgcagtggcatgatctgggctcactacaacctccatctccccagttcaagcgattctcctgcctcagcctcccgagtagctgcgactacaggcgagtgcctccatgcccagctaattttttgtatttttagtagagacggggtttcaccatgttagccaggatggtcttgatctcctgaccttgtgatctgtccaccgcggcttcccaaagtgctgggattacaggtgtgagccacagcgcccggccaaaaaaaggaatttttaagaggaaaaagaatgctaccaacctaaacacatttctgtgactgtttatatttttccctgttccacatacatacatttttacatagtacgttcattgcagcatgagttacttttcacttaataaattttaaacattttccagctgggtgtggtggctcatgcctgtaatcccaacacttggagaggccaagtcaggcttattgggtgagtccaggtgtttgagactagcctaggcaacatggcgaaactgcatctctacaaaaaatacaaaaattagccaggtgtgctggcgcacacctgtagtcccaactactcaggaggctgaggtgggaggattgcttgagcccaggaggtagaggttgcagtgagccatgatcatgccactgcactccagcctaggtgacaaagcacaaccctcaaataaataaataaatacatgttaaacatatacctttattacttcatttttgtaagagcttcagggaataggcttttttaaagggaatagacttatagatcaattttaatatttgacttatagaattttatgacactaaatggataattgtaaagtttgagttgggacccattttttaagacattcaggctataaacaaggtaataaatcacactcttccagttctactcccaatttaattggtttacagttcggtggctgtctttttttttttttttttttttttttgagaccgagtctccctctgtcaccaggctggagtgcagtggtgcaatctcagctcactgcaacctccccctctcaggttcaagtaattctcctgcctcagcctgccgagtagctgggactacagtcgcacgccaaccacccccagctaatttttttatttttagtagagacaggatttcaccatgtttgccaggatggtctcgatctcttgtgctcataatctacctacctcggcctcccaaagtgctcggattacagacgtgagccactgcgcccggcccgttggcttgctttctagatactgggaatagatcttgttatagtatgtgataaatagatcttgttatagtatgtgataaaatgccatgatcaaataaattacttatatcctgtttggtgatttttagaaaaacatatttatctacatctaaaatacttattttaattttaaacacttgatggtatgaaatgaaattttgttactttaccattgtaactatgtcataaagtcataaagtacctgtccccaaaaaggcaaccagtaaatatttttgagtaaatgaatgaaatctttattgccggtgttctgtgcacatagaataaaggaaattattaatgtta

SEQ ID NO: 6695 - DNA, 2618 bp, Homo Sapiens
  NM_177924
ggctcggtccgactattgcccgcggtgggggagggggatggatcacgccacgcgccaaaggcgatcgcgactctccttctgcaggtagcctggaaggctctctctctttctctacgccacccttttcgtggcactgaaaagccccgtcctctcctcccagtcccgcctcctccgagcgttccccctactgcctggaatggtgcggtcccaggtcgcgggtcacgcggcggagggggcgtggcctgcccccggcccagccggctcttctttgcctctgctggagtccggggagtggcgttggctgctagagcgatgccgggccggagttgcgtcgccttagtcctcctggctgccgccgtcagctgtgccgtcgcgcagcacgcgccgccgtggacagaggactgcagaaaatcaacctatcctccttcaggaccaacgtacagaggtgcagttccatggtacaccataaatcttgacttaccaccctacaaaagatggcatgaattgatgcttgacaaggcaccagtgctaaaggttatagtgaattctctgaagaatatgataaatacattcgtgccaagtggaaaaattatgcaggtggtggatgaaaaattgcctggcctacttggcaactttcctggcccttttgaagaggaaatgaagggtattgccgctgttactgatatacctttaggagagattatttcattcaatattttttatgaattatttaccatttgtacttcaatagtagcagaagacaaaaaaggtcatctaatacatgggagaaacatggattttggagtatttcttgggtggaacataaataatgatacctgggtcataactgagcaactaaaacctttaacagtgaatttggatttccaaagaaacaacaaaactgtcttcaaggcttcaagctttgctggctatgtgggcatgttaacaggattcaaaccaggactgttcagtcttacactgaatgaacgtttcagtataaatggtggttatctgggtattctagaatggattctgggaaagaaagatgtcatgtggatagggttcctcactagaacagttctggaaaatagcacaagttatgaagaagccaagaatttattgaccaagaccaagatattggccccagcctactttatcctgggaggcaaccagtctggggaaggttgtgtgattacacgagacagaaaggaatcattggatgtatatgaactcgatgctaagcagggtagatggtatgtggtacaaacaaattatgaccgttggaaacatcccttcttccttgatgatcgcagaacgcctgcaaagatgtgtctgaaccgcaccagccaagagaatatctcatttgaaaccatgtatgatgtcctgtcaacaaaacctgtcctcaacaagctgaccgtatacacaaccttgatagatgttaccaaaggtcaattcgaaacttacctgcgggactgccctgacccttgtataggttggtgagcacacgtctggcctacagaatgcggcctctgagacatgaagacaccatctccatgtgaccgaacactgcagctgtctgaccttccaaagactaagactcgcggcaggttctctttgagtcaatagcttgtcttcgtccatctgttgacaaatgacagatcttttttttttccccctatcagttgatttttcttatttacagataacttctttaggggaagtaaaacagtcatctagaattcactgagttttgtttcactttgacatttggggatctggtgggcagtcgaaccatggtgaactccacctccgtggaataaatggagattcagcgtgggtgttgaatccagcacgtctgtgtgagtaacgggacagtaaacactccacattcttcagtttttcacttctacctacatatttgtatgtttttctgtataacagccttttccttctggttctaactgctgttaaaattaatatatcattatctttgctgttattgacagcgatataattttattacatatgattagagggatgagacagacattcacctgtatatttcttttaatgggcacaaaatgggcccttgcctctaaatagcactttttggggttcaagaagtaatcagtatgcaaagcaatcttttatacaataattgaagtgttccctttttcataattactctacttcccagtaaccctaaggaagttgctaacttaaaaaactgcatcccacgttctgttaatttagtaaataaacaagtcaaagacttgtggaaaataggaagtgaacccatattttaaattctcataagtagcattcatgtaataaacaggtttttagtttgttcttcagattgatagggagttttaaagaaattttagtagttactaaaattatgttactgtatttttcagaaatcaaactgcttatgaaaagtactaatagaacttgttaacctttctaaccttcacgattaactgtgaaatgtacgtcatttgtgcaagaccgtttgtccacttcattttgtataatcacagttgtgttcctgacactcaataaacagtcactggaaagagtgccagtcagcagtcatgcacgctgattgggtgtgt

SEQ ID NO: 6696 - DNA, 3699 bp, Homo Sapiens
  NM_177925
agagccaatggaaaggggctgccgcgcggccgtaaagagtttgtagaggcagttcgggtgcggtacgttgcattccggtaccggacgccgagagcggtttgtctccgtctctggagttgtaggcgagaggtgatcatgtccggtcgcgggaaacagggcggcaaagtgcgagcaaaggccaaatcccgctcctcccgcgcgggcctgcagttcccggtgggccgagtgcacagactgctgcgcaaagggaactacgcggagcgagtgggcgccggggcgccggtgtacctggcggcggtgttggagtaccttacggcggagatcctggagctggctggcaacgccgcgcgtgacaacaagaagaccaggataattccccgccacctgcagctcgccatccgcaacgacgaggagttaaacaagctgctgggcaaagtgaccatcgctcagggcggcgtcctgcccaacatccaggccgtgctgctgcccaagaagacggagagtcagaagacgaagagcaaatgaccctgacgccgccctcagggagctggctcccccagcaaaggcccttttcatggtcgtcccgcaatgcttttgaatgtgctggatgtcatggagggccggtgacatctagcggggaggtgggcggcgagggtcccggcgggagccaataaagttggtgaaaatcgtttggtcgagagagctgtgtagtcgcggggacatgtcggatggccccaggggaggggggcgaccgggaaacccctggagcaggcactggtgggtgggcttgagccactctggacggctttagtccgcaggtcaccctcgaggcgtcaggggagggtggcctggaggtgggcagggtggaagccacctcgctgtcagtagggcaaaggggaggcagagtcggtgcggtgaggcctccttcggaattatttttacttccctttcacagagccttcgctctcctgccagtttgtgagcactcaggaccaagttctgggaagataccgtcggatcgagctgagctcggggcaggaagtgtctgcggccatatttttcaaaaagtggagtaactttccgtcttggaagggtggctctgatggcacgatgtcaacttgagattcttcctagcctagtagctgctgtgctttcatgctttggatatcagatatctttatatagcacttttatgttcatattttttttttaatgaaggaaacgttcaataagtgagtcatgaggttggaaattcgttcccctgacagtcatattgcataacattgcagcgcctttagtcgtgggttacatatgcttgagcttttaaagtgatgttgtcaagtttctagcttcataatgatcctgtcttcatcatatcatattcactttgagaatcggtttgactttgctttcaaacaaaacaaaaacctcttgcttttaggggttcttacccaacaaataacctgtttgaactctcttatattctcccactagcctgaagcaatgacctcattccagtaatgtctttgggagttgcattgcctaatggcacaatattgctttaataaacatgtaaggaaagataggaccaaatatgtaagtgcagggggaaacacatttcagaccaggaatccacattgaaaagttaacactagtaatcatcttctgcccttaattgacactcctatttatttcatcctcagcaaatttcatcctggctcacagaccccacaaaaaagatcccagtacagatttcacatctttggattcatctttcctgtgagtcggaattgaagtcttccccaaaaatatatgtatatattgtatgtcttcatccttggtagcggctggcccattttcccacatggactttattttgtccccagtatttattgaacagctgtctatgccaggctctgtacaaagtgataggagtagagctgtgaatgaggccaaccagatttccactctctcggagctcactttatttttattggttcctgaagacgggacaaggaacaaatacatacgttaatatgagagatcagcttctgttagtacttgtacctctctgctgtgtgtggatgaatgatggaattacttctcccatgttgccatttttgaggtgtacaaaggtcaggccgtacacacctctgttaggaggcaaattattgggcaggttcgagatgttctgctatttactctgtggttttgtcatatgtaaaagtcataacacctgttttaaggattgagattgttcatttactgtgtgccacatattagacaataaatggaaaaaagtaccatgttcaatgggggtatgggtttatccttataggttaaattataggtaaacattaataggactttttaaaaaatgcctcattgttagaactactactcacagttaccacttggggtcagtggaacaaaatgcatatatggttttgacatttgagtctaaatttcttaaagggatgaggcatctgagggattgttaccaaaatgatgaagaaataaggacaagggacatcaagacattcataagaaaaagcacctttgccttcccctgggaagattcacaggaatctgtccagctcttattacatgatgagcaacatagacaagatacgaggcattgtaactgccctgtcgccacccgcctctcccaccactacccaaaggattcttagcatcccctcacatactctgcctgcctcaacgttcagtcagcccctcaccatttttgtttttgagagttttttttttaacccgaatagtttacgggctgtttaaaatgcatactcctacaaaatcagctcagcccatgatccatgatgaacaaacagtagttcttgctgatgtgtgattatgaatttaaaaggccagtatttctttaagcataagaccatatggaaaaaggcctaagacaaaatctgatgggaactgaattccagtttttaatagagttataatccatagttttatttacacacaaacacacacacacacactctttcctgcagagataagcaagccgttcagtgtggctgtggcttggccaggatttgtttgatctttgtttttcctgcagggccagtcttgtctttgtgtccccgaggactggtctgtttagttgtgcctgcctggaatcaaaaggcttagtcaggccccataattggtgatgactggcatactatatgcaaacttcacaatgccccttccagtggttgaaaggtcgcataccatgctgtgtaagaactttagctctctgcaatgagacttaaattcagattcactctactccttattagttatctgatttttggaaacttaatctctttaaacctcagtttcatctctaaaatgggcataatagtttacctcatagagtttggggagaattgagtgaattaatgtgtgtgaggacactaagattcccatatagaaataggctcaatgaatagtagctgtttttatttctatgtaaagtgagtagcggtagttgatgggagctgttgaaacaggtaaacagcattctagcaatccttcgacttttgtgatagcaaaccataaaaacaattttagtggctgttttactaattaaaggacatccacaattcaatgtataacagaaaaagtaatgattaaagcttgtgaatctgaaaaaaaaaaaaaaaaaaaaaaaaaaaaaaaaaa

SEQ ID NO: 6697 - DNA, 3137 bp, Homo Sapiens
  NM_177926
attttgcaattgtgggttggctgaagaaaagaagacaacatgggaaaggaaaatctgggtgataaacggattaaacctttaggttaccgctgctctagataaacccatgatgtgactttttgtttttctcctaggtcagctgagggaacagctcagttaccttaagggtgataatttttttaggtttacttgttcggattgctcagcagatggcaaggagcagtatgaaaggctgaagctgacatggcagcaagtcgtcatgttggcaatgtacaacttgtctctggaaggaagtggacgtcaaggttatttcaggtggaaagaagatatctgtgcttttattgagaaacattggacttttttactagggaataggaaaaagacgtctacctggtggagcaccgtggcaggttgcctcagcgtgggaagtcccatgtacttccgttcaggtgctcaggaatttggagagccaggatggtggaaacttgttcataacaagcccccaacgatgaaacctgaaggagagaagttgtctgcctctactttgaaaataaaagcagcctcaaaaccaactttagatcccatcattactgttgagggacttagaaaacgagcaagtcggaatcctgtggaatctgccatggaattaaaagagaaaaggtctcgaactcaggaagcaaaagacattagaagagcccagaaggaggccgctggctttcttgacaggagcacatcttctacccctgtaaaattcataagccgaggccgcaggccagatgtgattctggaaaaaggcgaagtgattgacttttcctccttgagctcctctgaccgcaccccgctgacaagcccatctccttctccttctctggatttctctgcccctggtacacctgcctctcattctgccacacctagcttgctttcagaagcagatctgattccagatgtgatgcccccacaagccttgtttcatgatgacgatgagatggaaggcgatggagtcatagacccagggatggagtacgtcccaccccctgctgggtcagtagcttctgggccagtggttgggggcagaaagaaggtcagaggccctgaacagataaagcaggaggtagagagtgaggaggaaaaacccgacaggatggatattgacagtgaagacacagattcaaacacatctttgcaaacaagggctagagaaaagaggaagcctcagctggagaaggacacaaagccgaaagagcccaggtatactcccgtgagcatctacgaggaaaagctgctgctcaagaggctggaagcttgtcccggtgctgttgccatgactccggaagctcggagactgaaacgcaaactgattgtcagacaagcgaaaagggataggggattaccactttttgacttggatcaagttgttaatgctgctcttttgttagttgacgggatttatggagccaaagaaggaggaatttccagacttccagctggacaagccacgtacagaaccacctgtcaggacttcagaatccttgaccgataccagacttccttgccgtccaggaagggatttcgacaccagaccaccaagtttttgtatcgcttggtaggatcagaagatatggctgtggaccagagtattgtcagcccttatacctctcggatcttgaaaccttatatcaggcgtgattatgaaacaaagccacccaaactgcagctcctgtcacagattcgttcccacctgcacaggagcgaccctcactggacgccggagcccgacgcacctctcgattactgttatgtgcggccaaatcacatcccaacgatcaactccatgtgtcaggagtttttttggcctggcattgacctgtctgagtgtctgcagtacccagacttcagtgttgttgttctttataaaaaagtcatcattgcctttggcttcatggttcctgatgtgaaatacaatgaagcttacatttcatttctgttcgtccaccctgaatggagaagagcagggattgcaactttcatgatctatcatctgattcagacctgcatgggcaaggacgtaacccttcacgtctcagcaagcaaccccgctatgctactgtaccagaagtttggattcaagactgaagaatatgtattagatttctatgataaatattacccattggagagtacagagtgtaaacacgcattctttctgaggctccggcgctgatgcgaatacagctcacagagaaacgcatgtgctattggagaacaggtctttgtggagatctaaaggcagtgattgatttcacagggagctctaatctctgtgattacatggtccttcaaactcccaaccaaagtgagaaaagcggcatgcagtgaaatgagcagtgagcagccctttagcaaaatcgccctccagtccttcctggagatgccttcagccagcatcccagactccacagttatttatgaatgatgtcgtgattctccctccacctgacagtttgtaagagtgaaagagcatctaacctgatgctcttggagagagataacctgtctgtcataacttaaaggatgagaaaatgtggtgtagctattaaagattcatgcagtcccaaaaggcactgtcctgggatgatgagagattataaggtgatttcataaaaggaatccaaccctgtgcccggccattgatgtgttgtcattgaatccaggaggatttctagggcactgaagttttgttgtttcttttgctgactttggttacagtcagaaaaaataaactagatgtttgtgtctacatgttctacctgttgtacctattagcatcttcctgcagggacttgggcccatggcctgggaggttggtttgggattggggttgttgggcagcctgccattcacctggcctatcctggcccttctcatgcccaagacagttgtttcacaggagtggaagtgtgggtgatgcaagtagaaccctctagatgtaccctgtgtggtctgcaggactggactgtttgctgtgtttgtggatgttggcgatagactgtcaattaggttgtttgtgatccaacaagaacatttccaaaagtatctaggtgttctcaaataaaaagctttctttgcacaaccca

SEQ ID NO: 6698 - DNA, 3092 bp, Homo Sapiens
  NM_177937
gtttcaaatgcagctgcccgggctataagatcacacccgaaggcgtccgggaatcttcactttttccgttgctagcagtggaagggtcacagaccaaacactaaggcctgagcggtgacaaccgaggcgagatgatggtcaacagggaatgcctcgtgggagaaaaaagacaattttattctcagcgctgattttgagatgatgggcttgggaaacgggcgtcgcagcatgaagtcgccgcccctcgtgctggccgccctggtggcctgcatcatcgtcttgggcttcaactactggattgcgagctcccggagcgtggacctccagacacggatcatggagctggaaggcagggtccgcagggcggctgcagagagaggcgccgtggagctgaagaagaacgagttccagggagagctggagaagcagcgggagcagcttgacaaaatccagtccagccacaacttccagctggagagcgtcaacaagctgtaccaggacgaaaaggcggttttggtgaataacatcaccacaggtgagaggctcatccgagtgctgcaagaccagttaaagaccctgcagaggaattacggcaggctgcagcaggatgtcctccagtttcagaagaaccagaccaacctggagaggaagttctcctacgacctgagccagtgcatcaatcagatgaaggaggtgaaggaacagtgtgaggagcgaatagaagaggtcaccaaaaaggggaatgaagctgtagcttccagagacctgagtgaaaacaacgaccagagacagcagctccaagccctcagtgagcctcagcccaggctgcaggcagcaggcctgccacacacagaggtgccacaagggaagggaaacgtgcttggtaacagcaagtcccagacaccagcccccagttccgaagtggttttggattcaaagagacaagttgagaaagaggaaaccaatgagatccaggtggtgaatgaggagcctcagagggacaggctgccgcaggagccaggccgggagcaggtggtggaagacagacctgtaggtggaagaggcttcgggggagccggagaactgggccagaccccacaggtgcaggctgccctgtcagtgagccaggaaaatccagagatggagggccctgagcgagaccagcttgtcatccccgacggacaggaggaggagcaggaagctgccggggaagggagaaaccagcagaaactgagaggagaagatgactacaacatggatgaaaatgaagcagaatctgagacagacaagcaagcagccctggcagggaatgacagaaacatagatgtttttaatgttgaagatcagaaaagagacaccataaatttacttgatcagcgtgaaaagcggaatcatacactctgaattgaactggaatcacatatttcacaacagggccgaagagatgactataaaatgttcatgagggactgaatactgaaaactgtgaaatgtactaaataaaatgtacatctgaagatgattattgtgaaattttagtatgcactttgtgtaggaaaaaatggaatggtcttttaaacagcttttggggggtactttggaagtgtctaataaggtgtcacaatttttggtagtaggtatttcgtgagaagttcaacaccaaaactggaacatagttctccttcaagtgttggcgacagcggggcttcctgattctggaatataactttgtgtaaattaacagccacctatagaagagtccatctgctgtgaaggagagacagagaactctgggttccgtcgtcctgtccacgtgctgtaccaagtgctggtgccagcctgttacctgttctcactgaaaagtctggctaatgctcttgtgtagtcacttctgattctgacaatcaatcaatcaatggcctagagcactgactgttaacacaaacgtcactagcaaagtagcaacagctttaagtctaaatacaaagctgttctgtgtgagaattttttaaaaggctacttgtataataacccttgtcatttttaatgtacaaaacgctattaagtggcttagaatttgaacatttgtggtctttatttactttgcttcgtgtgtgggcaaagcaacatcttccctaaatatatattaccaagaaaagcaagaagcagattaggtttttgacaaaacaaacaggccaaaagggggctgacctggagcagagcatggtgagaggcaaggcatgagagggcaagtttgttgtggacagatctgtgcctactttattactggagtaaaagaaaacaaagttcattgatgtcgaaggatatatacagtgttagaaattaggactgtttagaaaaacaggaatacaatggttgtttttatcatagtgtacacatttagcttgtggtaaatgactcacaaaactgattttaaaatcaagttaatgtgaattttgaaaattactacttaatcctaattcacaataacaatggcattaaggtttgacttgagttggttcttagtattatttatggtaaataggctcttaccacttgcaaataactggccacatcattaatgactgacttcccagtaaggctctctaaggggtaagtaggaggatccacaggatttgagatgctaaggccccagagatcgtttgatccaaccctcttattttcagaggggaaaatggggcctagaagttacagagcatctagctggtgcgctggcacccctggcctcacacagactcccgagtagctgggactacaggcacacagtcactgaagcaggccctgtttgcaattcacgttgccacctccaacttaaacattcttcatatgtgatgtccttagtcactaaggttaaactttcccacccagaaaaggcaacttagataaaatcttagagtactttcatactcttctaagtcctcttccagcctcactttgagtcctccttggggttgataggaattttctcttgctttctcaataaagtctctattcatctcatgtttaatttgtacgcatagaattgctgagaaataaaatgttctgttcaacttataaaaaaaaaaaaaaaa

SEQ ID NO: 6699 - DNA, 2294 bp, Homo Sapiens
  NM_177938
agagggcgtcttcacgcaggcaccgagaagctcccactagtgtatgccttaatggtgccgctcttgtccgcgtctacgcttgggaccttggcttctgacttggagagtgtacagctctgcccgacggcaacccagcttgggaagagaagccccagcgtgggctggggctcaaggcgcaggaaggccgagcccggcgcggacgcaggcggctccgggcgggctcagcacccccaggcaccgtctcctagtgaccgcggcgctcgcgggcctggcggccgttgtccgggcgactgcgcagcgcgggcacccccgcggcccctcccctgggcgcgcgcgcgacctgggtgccatggcggcagcggcggtgacaggccagcggcctgagaccgcggcggccgaggaggcctcgaggccgcagtgggcgccgccagaccactgccaggctcaggcggcggccgggctgggcgacggcgaggacgcaccggtgcgtccgctgtgcaagccccgcggcatctgctcgcgcgcctacttcctggtgctgatggtgttcgtgcacctgtacctgggtaacgtgctggcgctgctgctcttcgtgcactacagcaacggcgacgaaagcagcgatcccgggccccaacaccgtgcccagggccccgggcccgagcccaccttaggtcccctcacccggctggagggcatcaaggtggggcacgagcgtaaggtccagctggtcaccgacagggatcacttcatccgaaccctcagcctcaagccgctgctcttcgaaatccccggcttcctgactgatgaagagtgtcggctcatcatccatctggcgcagatgaaggggttacagcgcagccagatcctgcctactgaagagtatgaagaggcaatgagcactatgcaggtcagccagctggacctcttccggctgctggaccagaaccgtgatgggcaccttcagctccgtgaggttctggcccagactcgcctgggaaatggatggtggatgactccagagagcattcaggagatgtacgccgcgatcaaggctgaccctgatggtgacggagtgctgagtctgcaggagttctccaacatggaccttcgggacttccacaagtacatgaggagccacaaggcagagtccagtgagctggtgcggaacagccaccatacctggctctaccagggtgagggtgcccaccacatcatgcgtgccatccgccagagggtgctgcgcctcactcgcctgtcgcctgagatcgtggagctcagcgagccgctgcaggttgttcgatatggtgaggggggccactaccatgcccacgtggacagtgggcctgtgtacccagagaccatctgctcccataccaagctggtagccaacgagtctgtacccttcgagacctcctgccggcaagtatctcccaactgggggctgccttcaatcctcagaccaggaacacccatgacacaggcacagccctgcactgtgggcgtgccccttggcatggggccaggagatcactgggttatcccggtaagcccctgggagcatccacaactggggacctgctcagtgccccccctgccttacagctacatgacagtgctgttttatttgaacaacgtcactggtgggggcgagactgttttccctgtagcagataacagaacctacgatgaaatgagtctgattcaggatgacgtggacctccgtgacacacggaggcactgtgacaagggaaacctgcgtgtcaagccccaacagggcacagcagtcttctggtacaactacctgcctgatgggcaaggttgggtgggtgacgtagacgactactcgctgcacgggggctgcctggtcacgcgcggcaccaagtggattgccaacaactggattaatgtggaccccagccgagcgcggcaagcgctgttccaacaggagatggcccgccttgcccgagaagggggcaccgactcacagcccgagtgggctctggaccgggcctaccgcgatgcgcgcgtggaactctgagggaagagttagccccggttcccagccgcgggtcgccagttgcccaagatcaggggtccggctgtccttctgtcctgctgcagactaaaggtctggccaatgtcttgccccaccccgccagccgcgatacggcgcagttcctatattcatgttatttattgtgtactgactccatctgccccgtcaaataaaaaaccacaaggttcgagccgccgggcccgacaaactccgggtcggcgaaaaaaaaaaaaaa

SEQ ID NO: 6700 - DNA, 2858 bp, Homo Sapiens
  NM_177949
cttaaagccctgaccgtcgttctccgtcctcctctgggtaccaactctattgcgcagctcgctgccgtgcgtttaacccaggcgaggaggaggaggagaaaattcccccagattcgggcaggcccgcaccccacattccgtcctgttttgagaggaggagggaagagaaataaacgtggcagcgcatagaaggccagcagggagactgctttccagacacctccggcccacacagccgttcaccccccgtcttttcagtcctggaaaaggaattcggtctgtccttaggatgaagctctaactgaactgaagtaaggagaaacagccttgaatctttggagggtctgtcttccttttgggctctgtgcaactgcagctacagtggaaaaaagcaaactgctcttgatcccaggccctgcctaagcctcagcagaacttgtaagcctaaactgaagagcctcacccggacgagcaggcatcccttaaccttaagcaatccagttccacgccctggatcagtgaataaccccagctgcaccatgagccgcgttcgggatgctggctgtgtagcggcggggatagtgataggggctggtgcctggtactgtgtctacaaatacaccagggggagagaccagaccaagaagagaatggccaagcccaaaaaccgggctgtggctgggactggagccagggctagagctgggctaagagccggattcacaatcgaccttgggtcaggattcagtcccccaaccccagtccgtgctgaagcagaggacagggcccaggatgaagcctctgctctggacacagttggagctgaggcagtggccccagctgcatccagcgctgaggctcagagtggggcaggcagtcaggcccaagaggcagatggagccggggttgggcctaaggccgaatcagtagttggggctgcaatggcttctgcaatagcaccacctcccggggtgacagaggcccttggggctgcagaagcccctgcaatggcaggggctcccaaagtggcagaagctcccagagaagcggagacttccagggcagcggtgcctcctgggacagtggtgcctaccgaagcggcagcacccactgaggtgaccgagggtcctggggtagcagcacctaccaaggtagctgaagctcccggggtggcatcgcctaccgaggcagctgaggctcctgtgcccgcaacgcctactggggctgcagcacctactggggctgcagagtctcctggaacttctggttcccctagaacagcggtggttcctggaacatcagctgccaagaaagcaacccctggggctcacactggggctataccgaaagccacatcagcgactggagcggtacccaaaggtggaggcaagggtgtaaccaggtcccggaatgggggcaagggcaagggcaagaaaagcaaagttgaagtagacgaactggggatgggcttccgtcctggagatggggctgcagcagctgctgcagcctctgctaatggcggacaggctttcctggcagaggtccctgattctgaggaaggggagtccgggtggactgacacagagtcagattcagactctgagcccgagacccagcgcagagggaggggaagaagacccgttgccatgcagaagcgcccctttccttatgaaattgatgagattctgggtgtccgcgatctcaggaaggtccttgccttgcttcagaaatctgatgatcctttcatccaacaggtagctttgctcactctgagcaacaatgccaattattcatgcaatcaagagacaatccgcaaattgggaggcctcccaattattgcaaacatgatcaacaaaactgatccacacattaaggaaaaagccttaatggccatgaataacctgagtgagaattatgaaaatcagggccggcttcaggtgtacatgaataaagtgatggatgatatcatggcctctaacctgaactcagcagttcaagtagttggactaaaatttctaacaaacatgactattactaatgactaccagcacctgcttgtcaattccattgcaaactttttccgtttgctatctcagggaggtggaaaaatcaaggttgagattttgaaaatcctttcgaattttgctgaaaatccagatatgttgaagaaacttctcagtacccaagtgccagcatcatttagttccctctataattcttacgtggaatcagaaatccttattaatgcccttactctatttgagattatctatgacaatctcagagcagaagtgtttaactatagagaattcaataaaggttcccttttttacttatgcactacatctggagtgtgtgttaagaaaattagagccttagcaaatcaccatgacctcttagtgaaagtgaaagttataaaactagtgaacaaattctgattggttatgtaccgtcaaaagacttgaagaaatttcatgattttgcagtgtggaagcgttgaaaattgaaagttactgcttttccacttgctcatatagtaaagggatcctttcagctgccagtgttgaataatgtatcatccagagtgatgttatctgtgacagtcaccagctttaagctgaaccattttatgaataccaaataaatagacctcttgtactgaaaacatatttgtgactttaatcgtgctgcttggatagaaatatttttactggttcttctgaattgacagtaaacctgtccattatgaatggcctactgttctattatttgttttgacttgaatttatccaccaaagacttcatttgtgtatcatcaataaagttgtatgtttcaactgacaaaaaaaaaaaaaaaa

SEQ ID NO: 6701 - DNA, 4334 bp, Homo Sapiens
  NM_177951
gctagggacgggagcgcgcgcgggagctagagagcagtggtctcggcgctcgtccggcccgcagcttcgggtcctcaggcggctgttgctccggaacgggtggttggggaggggggggtggggggactctagacagctgaggcgcgaaagcgatgagtcctcggctcttcctcctccttctccgggacccgctctctgcctccctctccaacgcccggatgatctgagccgcgagggcgccgacagccgggggcccggacgcagcccggctcctcccctcctccgccccttccccagcctgacctggcccgccgctgcagcggtgacccctcccccggctgccgccgtcgccgccgcggtgaccccctccccggctgccgccgccgccgcctcggccgaccagggacctgcccgcctgcggctgctccggattttaaataaacttggagccttttcttgaaagacagctggctgtggagagccttctaccaactgcagttttagatacgttttgaaaatttcatcacctgagacctagaggatcaagacataatgggagcatttttagacaagccaaagatggaaaagcataatgcccaggggcagggtaatgggttgcgatatgggctaagcagcatgcaaggctggcgtgttgaaatggaggatgcacatacggctgtgatcggtttgccaagtggacttgaatcgtggtcattctttgctgtgtatgatgggcatgctggttctcaggttgccaaatactgctgtgagcatttgttagatcacatcaccaataaccaggattttaaagggtctgcaggagcaccttctgtggaaaatgtaaagaatggaatcagaacaggttttctggagattgatgaacacatgagagttatgtcagagaagaaacatggtgcagatagaagtgggtcaacagctgtaggtgtcttaatttctccccaacatacttatttcattaactgtggagactcaagaggtttactttgtaggaacaggaaagttcatttcttcacacaagatcacaaaccaagtaatccgctggagaaagaacgaattcagaatgcaggtggctctgtaatgattcagcgtgtgaatggctctctggctgtatcgagggcccttggggattttgattacaaatgtgtccatggaaaaggtcctactgagcagcttgtctcaccagagcctgaagtccatgatattgaaagatctgaagaagatgatcagttcattatccttgcatgtgatggtatctgggatgttatgggaaatgaagagctctgtgattttgtaagatccagacttgaagtcactgatgaccttgagaaagtttgcaatgaagtagtcgacacctgtttgtataagggaagtcgagacaacatgagtgtgattttgatctgttttccaaatgcacccaaagtatcgccagaagcagtgaagaaggaggcagagttggacaagtacctggaatgcagagtagaaggtggatcatttaacaaaaaataagtagctttattaaagaaaaatcttcaacacaatcaaactttaacattttagcttttagatttttatgtgtctttgacagctagtgtctagtgtatgaaagtggaaaaggacatttctgtagtagctgttaagatgtatgcagttgtcctatcacagttatattagaaataacaactagtgtggaaagtaacccacattctgttcaggatacttttgttttaaaaggctaaaatgtttgtgtgctttaaaattcttaatgaattcactggcatgagtaattttatgccgggaaaatctgatttgtggtctatttaattacaaagagattgtgatggtgataatttgaataccatctttctatgaaaagctgtgtatattaattttaatctctagggccttttttcaataacttgaaaatcacagcctcatcattagcaactttatatacacagctttaaaaaatttgctttaaactgtttcagagcttcttccctaagccataaactgtctcacctaaacaagatagacctcaataaaagacataatatttctccacctggcagaaaagtaactgccaagtaagattaagaaataagttgagcatttctggagtatatttctcataattctgcagagacttccagtttattgcatatatgcagtaaagtgtatatattatgcagtttctctaagtggaaaaacttgacatgactttaatagtgttaaaacatgaaaatgctggtgagctgaggtagaaaaaaaacaagaaaaaaattttaaaaatagcgttaaaatgcattttaggctcctaatgtcgttaatttgcacgttaaagacctctaatcgcatgcaagcattgacctaccacacctacatcccactgtgcctgcattattgaaattactactcactttaattttttttcccctttttactgtttgataccaatcataatcagtctgatactagaatcatgattggttttgttctttagtactgtctagagctactattttgtttttattgctgtccgccacttgatagtcatacatctagtatgtgtttgtactatttagtattgcattcattggacgtactattcaacgaatttgtctccttactgttaccaagggtcttggaatttttatattttaaattaatcattcaatataagttatttataggtatagtacaattttaaaatatttagaatgctacaatcattggttcaaactattgattcatgggaaaatttaaattcataagaataatatgtatagggataagttgatatttaatgtattggcactttaacttgggcagacatgttttcttattggtttaaagaagtaataagtattttaatatttttactatgaaatgggatccaattttagaaatgaattgctacttttctctttagtgtgtacactttaagttttagatggaattatgaaatattcactttacgttattttgttacaataataagttttatatttcttattatcaagcaagagttgccacctggacagagtttacattgatactcaatatttttgatatgttaaagtgttattatacttgtaccattcaattggagattgtcataaattaaatatggtattttttactcagatttgatgagactgcaactagagaataaatattacattaaaattgctgctattttaaaacatagaatgtaactgtttgtattgtaaaagttgtgtgtcctcagtgaaaaatactgccttcagcttccaaagcaggcacctgaatgcctttttcttttctctctctcttctttctttaaatacatgccttcactagattgctgtgacctactaaacctcattttatttgcttggaacatttttggcttctctgtccacaccatagaaaaggacaaaggccttccagctctccttttctcttatttgttcccttctaaatacttgactctctgggggtgtgaaaagattcagctcataatttatactactattaattttgtggtccttctaagccaatttaaaattatacttttgtgtatatattttcaaaatctttgctactgactaccttagctttaaagttgctaatttggagatgactgatagaatccctgaaacttggtggaggggagtggaaaggagcagaatgtgtttgtgtatatgtatgtgaaacatggatcttctatatataaatattctttagaaaaagcgttcagtctttttacaattctaagtaaaacgtataggtcaacagaaattaaaggaatatttcttaaaattcatttatttttcttttttgaaagcagacagaagcaaggctagtatagtatgaatggtcaggtagtttaaatgcgttgtcccacgtggaacaggagatattaactgtttttaaagctttacattatttttttacaagaatttgttttcctgtaattttcttcacagttaaaatatcctaatttatattttaacaaaagagatgtaagatacatcaaatatagatgattcaaggtaatgttttttagacctgaaactattgattcaatttatcatcagtgtttatttctattgtatctagttatctatccaaataattgtattggcttagcggagactgtatgttaagtgtattagttttagattgtgaaattgtgcagtttaggtaaacatcaaatccctttatttttgtacagcagatttccagcattagaaccatgtagaacaaatatactagatgttaaagattacacaataaaggaacttggcaaaccaaaaaaaaaaaaaaaaaaa

SEQ ID NO: 6702 - DNA, 2610 bp, Homo Sapiens
  NM_177967
atgttcaccagcaccggctccagtgggctctgtgagtaccggcctccgccatcctggctgccccctacacgccaccctaggcacctctttgaggaggctggggcagcggggaccctcgggtttgccggaggtggtggggccgaccctccagacccgcgtccgaaccctgctagttcccggtcttgggggtcagcggaaaccgcccccatttcggcctggaggggcgaatggggacaaagccccgccgcccgccccgaccccacctggtatccccaggtgctctgcccaggagtctcttggggccgctgcaagtgggcaggtgccctggtgttctcgtgggccggccccaggccctttgcggagcgtgtgccgcgctgaaggaaggggccgtcccccttaccatgccccattcttttaggcttgggggaccgaactaactccccccgcccccacttgcaaagttcagcctccgctttagaagctgacctctcagtttcacttggatgtgtttcttcttcagtctccaagaagagtttttagacaaacacacactgatgagagtgctttcaagtggagggaagttaggaagtcgtggcgagggagcgcagctgtgctgctggatgttgctgttttcctggcgtgttagcggtggtcagcagacaaggcgcctctgtcgaagagccttctgctggtccccagtgccctctccctcctgctcgccctcctcctgcctcactgccagaagctctttgtgtatgaccttcacgcagtcaagaacgacttccagcctggcacctgtgtttgctctgtttgtaccattttactgctccataccaagagtccaagtggcacaaattctgggtccgttgtccatcacaaacaagacattgatttatatattgggactgcagcttttcacctctggttcctacatctggattgtagccataagtggacttatgtccggtctgtgctacgacagcaaaatgttccaggtgcatcaggtgctctgcatccccagctggatggcaaaattcttttcttggacacttgaacccatcttctcttcttcagaacccaccagcgaagccagaattgggatgggagccacgctggacatccagagacagcagagaatggagctgctggaccggcagctgatgttctctcagtttgcacaagggaggcgacagagacagcagcagggaggaatgatcaattggaatcgtctttttcctcctttacgtcagcgacaaaacgtaaactatcagggcggtcggcagtctgagccagcagcgccccctctagaagtttctgaggaacaggtcgcccggctcatggagatgggattttccagaggtgatgctttggaagccctgagagcttcaaacaatgacctcaatgtcgccaccaacttcctgctgcagcactgatagtcccaggccaacactgggaccggaccggcagccgagtgacagtgcgtggtccccaccatcagatcagcccggggaccgagcatctctggtgctgatgttcttgtgggaagagggaggttccaccgcacccctgccctcaaccgcaagactgttgccgttttagtgtggagataagtttgccattacattagcatgtattttctatctatattttttattgggcattttccctaggttggagagtcagcactcgttttgaatgtgtttaaaatgcattaaaatggaagatttctgcaggcagttgaatggcactccagatggggaattgctgtaaccctcttactgtaacatgtcatctcctgcgtcgtgatggggagagggtaatgttacttcacaaaggacatgtcagatccttcttcatggacttttttagttactgttttttctctcaaacttgttttcgaatctcctgggagtgagggagaaacagggagctgaatcctcccccaagctgttccaggccagaggactctgcagtaccttctcctacatctagtaacaaagaatggtgataaccatgcactggttcaaggttctggagttctccatgaaacttgggttaattttgctcagagtatccagagttagccactaggctgcgggtgaaatgggatggagaagaacaacagcaggcttcctggagccacatgggctgactagggcactctgtggctggcctggcatgggctcagcccaggaagaggagaaacgatcccttgcctgcccctccctgtggcagggctaactgcctggccctcctggctcgcagccagccagccccctggcagcaggttctcctcagggcttgggtcttcaacctgtggcgacaggaggcagggcagactgtggaggacaggatgcaggtcagggagagggaaggcaggggtggaccgccatgagcatgaaaagacccgaagcaagttgactcttgcaatgtgcaactgttatgttctgcaaaatgagcaacgatgtatcaaattgatgcaaatttagatgttgatacttacaataaagtttttaatgtgttttactcttcagtatttttctatcagacttgtacaaataaagccttgttccaggctatacatatttaccagtcaaaaaaaaaaaaaaa

SEQ ID NO: 6703 - DNA, 3193 bp, Homo Sapiens
  NM_177980
agaccccagccagtcttttgtgtacgtgcaggaccatggtggctttagtttctaccccacccttcctaggaactctacttgtggcaaacgtatgttcaagcttacaagtcagcccaccccactctgataaatgcaagaaaagctgaaaagggaggagcaagatgggatgaaagcatctgggccaaagtgacctgaaaacctttagagaagaagctgctggctgagaaggaggtgtgtggctccggtgagaccaccagcttggaggactggtcatcagctgcacgttctgggtctgtcttgggtattcccatatggccatgagatccgggaggcacccctcgctgctgctgcttctagtgctgctgctgtggctgctgcaggtcagtatcattgacagtgttcaacaggaaacagatgatcttactaagcaaacaaaggaaaagatctaccagcctctacggcgatccaagagaagatgggttatcaccaccttggagctggaggaggaagacccgggaccctttcccaaactcattggtgagctgttcaataatatgtcttataacatgtcactaatgtatctaatcagtggacctggtgtggatgaatatccagagattggtttgttttctctagaagatcatgagaacggaaggatatatgttcaccgccctgtcgatcgagaaatgacaccatctttcacggtttattttgatgttgtggagcgctcaacaggaaaaattgtggatacatccttgattttcaacattaggatcagtgatgtgaatgatcatgcaccccagtttccagagaaggaatttaacatcactgtgcaagaaaaccaatctgcagggcaacctatttttcagatgttagcagtcgatttggatgaagaaaacactccaaattctcaagtcctttacttcctcatttctcaaacaccattactgaaagaaagtggtttccgggttgatcgccttagtggagaaatacgactctctggctgcttagattatgagaccgctcctcagtttacactgctaatcagagccagggactgtggagaaccgtcactgtcatccacgaccaccgttcacgtggatgtgcaagaaggcaacaaccacaggcctgcatttacccaggagaactataaggttcagattcctgaaggccgagccagccagggcgtgttgcgtctcctggttcaagatcgagattctccatttacatcagcttggagagcaaaattcaacatattgcatggcaatgaagaggggcattttgacatttcgactgaccctgagaccaacgaagggatattaaatgttatcaagcctttggattatgagactcgcccagcgcaaagcctcatcattgtcgtggagaatgaggagaggctcgtcttctgtgagagaggaaagcttcagccgccaaggaaggcagcagccagcgccactgtgagtgtgcaggtgacagacgccaacgacccaccagcctttcacccccagagcttcattgtcaataaagaggagggcgccaggcctgggaccctgttgggaacttttaatgccatggatccagacagccagataagatatgaactggttcatgacccagcaaattgggtcagcgtcgacaaaaactccggagtggtcatcaccgtggagccaattgaccgagaatcccctcatgtaaataacagtttttatgtaatcatcattcacgctgttgatgatggcttcccaccgcagactgctacagggaccctaatgctcttcctgtctgacatcaatgacaacgtcccgactctccggccacgttcccgctacatggaggtctgtgagtctgctgtgcatgagcccctccacatcgaggcagaggatccggacctggagccgttctctgacccatttacatttgaattggacaatacctggggaaatgcggaggacacatggaagttggggagaaattggggtcaatcagttgaacttttaaccttgagaagcctgccacgtggtaattacttggtgccactcttcattggagacaaacagggactttcccagaagcaaactgtccatgtaaggatctgcccctgtgccagtgggctcacatgtgtggagcttgcagatgcagaagtggggcttcatgtgggggccctgttccctgtctgtgcagcatttgtggctctggcagtggctctgctttttctgttgcgatgctattttgtgcttgaacctaagaggcatggatgctctgtatccaatgatgaaggccaccaaacactggtcatgtataatgcggagagcaaaggcacttcagcccagacatggtcagatgttgaaggccagaggccggctctgctcatctgcacagctgcagcaggacccacgcagggagttaaggatctcgaggaagtgcctccatctgcagcgagtcagtcagcccaagcacgctgtgctctggggagctggggttatggcaagccctttgagccaagaagtgtgaaaaacatacactctactcctgcttacccagatgccacaatgcacagacaactcctggctccggtggaaggaaggatggcagagacattgaatcagaaactccatgttgccaatgtgctggaagatgaccccggctacctacctcacgtctacagcgaggaaggggagtgtggaggggccccatccctcagctctctggccagcttggaacaggagttgcaacctgatttgctggactctttgggttcaaaagcgactccgtttgaggaaatatattcagagtcaggtgttccttcctaaaaaaaaaagtctattttggagaattgaaataattcatggaagggaatcactattcagggatttttcccctttgctcttcttttccctccttaaaagaaaaattaccttctagtcctaggatgaggacacactattagtttgaattaaatgctttgatattctcagatcagccatcttgaaccaaagcaaaaccacaagttacactttcttaaaatttgatttgtcatattttctagagaaacttgaatttaattgtgttattcttagcttccactggcagcctagctttgagggtaaatgaaaatataacccatagattacccagccacttgggaacagcaggtaatactgaagaaaaataaaaatagattttgaaaacgtta

SEQ ID NO: 6704 - DNA, 1076 bp, Homo Sapiens
  NM_177988
gttttgccagttatgcgaaaacatggctgcggccggtttggcccttctttgtaggagagtttcatccgccctgaaatcttcccgatcgttaataactcctcaggtccctgcctgcacagggagcagcatggacctgtcagcaactaaggaacaaaagtaatgaagatttacacaaactttggtatgtcttactgaaagaaagaaacatgcttctaaccctagagcaggaggccaagcggcagagattgccaatgccaagtccagagcggttagataaggtagtagattccatggatgcattagataaagttgtccaggaaagagaagatgccctaaggcttcttcagactggtcaagaaagagctagacctggtgcttggagaagagacatctttggaagaatcatctggcacaagttcaagcagtgggttataccttggcacctaaataaaagatacaataggaaacgattctttgccttgccttatgtggaccattttctcagactggaacgtgagaaacgagcccgcatcaaagcacggaaggaaaatttagagagaaagaaagcaaaaattcttttaaaaaagtttccacatcttgctgaagcccaaaagtcaagtcttgtctaagatgtctgaactattaaatttaccattttgtttttcttgaatagtctgtgtacaggagtaaatatgttaagtggtttataaagaaattctgtttttagtcaagtgactttactaatcagttgttctaagtgtgaatatggcatgctaattagctaatttggtagaagctaatttgcttctaaaaatcaggtataaagttcagatgagattcccactttataaattctgacatttaagcaggctttaaatgtcacctgctaccttagagtgtgaaggtgatggtaactgccacagcaaaggcaataccgtagtttttgaatttgaataatagttttacctctgttgttaataggctatgaagaggatgtgggtattgctgttaataaacggaggactttgattcaaaaaaaaaaaaaaaaaaaaaaaaaaaaaaaaaaaaaaaaaaaa

SEQ ID NO: 6705 - DNA, 1764 bp, Homo Sapiens
  NM_177989
gccagcaagtgtggctgagctccggggtgtgtggacgccgctttgttgcctgagatgaagttggagcccttgtttttgacattggatcctatactgtgagagctggttatgctggtgaggactgccccaaggtggattttcctacagctattggtatggtggtagaaagagatgacggaagcacattaatggaaatagatggcgataaaggcaaacaaggcggtcccacctactacatagatactaatgctctgcgtgttccgagggagaatatggaggccatttcacctctaaaaaatgggatggttgaagactgggatagtttccaagctattttggatcatacctacaaaatgcatgtcaaatcagaagccagtctccatcctgttctcatgtcagaggcaccgtggaatactagagcaaagagagagaaactgacagagttaatgtttgaacactacaacatccctgccttcttcctttgcaaaactgcagttttgacagcatttgctaatggtcgttctactgggctgattttggacagtggagccactcataccactgcaattccagtccacgatggctatgtccttcaacaaggcattgtgaaatcccctcttgctggagactttattactatgcagtgcagagaactcttccaagaaatgaatattgaattggttcctccatatatgattgcatcaaaagaagctgttcgtgaaggatctccagcaaactggaaaagaaaagagaagttgcctcaggttacgaggtcttggcacaattatatgtgtaattgtgttatccaggattttcaagcttcggtacttcaagtgtcagattcaacttatgatgaacaagtggctgcacagatgccaactgttcattatgaattccccaatggctacaattgtgattttggtgcagagcggctaaagattccagaaggattatttgacccttccaatgtaaaggggttatcaggaaacacaatgttaggagtcagtcatgttgtcaccacaagtgttgggatgtgtgatattgacatcagaccaggtctctatggcagtgtaatagtggcaggaggaaacacactaatacagagttttactgacaggttgaatagagagctgtctcagaaaactcctccaagtatgcggttgaaattgattgcaaataatacaacagtggaacggaggtttagctcatggattggcggctccattctagcctctttgggtacctttcaacagatgtggatttccaagcaagaatatgaagaaggagggaagcagtgtgtagaaagaaaatgcccttgagaaagagttcccaagcttctaccttccttttgtcaccttacgtttcatagctttagtatactcaggaaaagaatgaccatcttttgtagaatgtttatacatttttgcatatttcaatttccacttaaattttttaaagctttaactggctctataaattaagtttgtgctttccttgaaatgcacttattcttattacaagcattttataattttgtataaatgtctattttctctaaatattttgctttcagtaaaatgctttccaactctgtttagtgtattaattaccagtggattggtagaactgctttttattgactagtaaaagttactgcctatgctttttaccttaggcttacagaattaaataaaaattagccattccagaaataaaaaaaaaaaaaaaaaaaaaaaaaaaaaaaaaaagaaaaaaaaaaaaaaa

SEQ ID NO: 6706 - DNA, 4671 bp, Homo Sapiens
  NM_177990
aaaacccggagcagctgcgtacgctcatggacagtcctccgaggggcgaagccgggcagctgggcatgctcagtagctgggggaggtttgggtggagagtagaaagctgtggctctgcctctcaccccctcccgctggcccccgccccccttgcccctacccagccagtagtagttccccagcgtgcgcccggggagaccgggaacatggcgctgggagcgctgtagcagctgagaaggggctgaggcaccgccgcttcgctgacagccggccaccagaaatacactgtggtgaaatgcttccacctcttgctaaaatgaacactgaggaaaaatgaagaagactgacaagcaccagcgaaaagttgcagaatagaaatagccacactcctctggagtctttaattcatccacagccatcatataaaggttttggcatcatgtttgggaagaaaaagaaaaagattgaaatatctggcccgtccaactttgaacacagggttcatactgggtttgatccacaagagcagaagtttaccggccttccccagcagtggcacagcctgttagcagatacggccaacaggccaaagcctatggtggacccttcatgcatcacacccatccagctggctcctatgaagacaatcgttagaggaaacaaaccctgcaaggaaacctccatcaacggcctgctagaggattttgacaacatctcggtgactcgctccaactccctaaggaaagaaagcccacccaccccagatcagggagcctccagccacggtccaggccacgcggaagaaaatggcttcatcaccttctcccagtattccagcgaatccgatactactgctgactacacgaccgaaaagtacagggagaagagtctctatggagatgatctggatccgtattatagaggcagccacgcagccaagcaaaatgggcacgtaatgaaaatgaagcacggggaggcctactattctgaggtgaagcctttgaaatccgattttgccagattttctgccgattatcactcacatttggactcactgagcaaaccaagtgaatacagtgacctcaagtgggagtatcagagagcctcgagtagctcccctctggattattcattccaattcacaccttctagaactgcagggaccagcgggtgctccaaggagagcctggcgtacagtgaaagtgaatggggacccagcctggatgactatgacaggaggccaaagtcttcgtacctgaatcagacaagccctcagcccaccatgcggcagaggtccaggtcaggctcgggactccaggaaccgatgatgccatttggagcaagtgcatttaaaacccatccccaaggacactcctacaactcctacacctaccctcgcttgtccgagcccacaatgtgcattccaaaggtggattacgatcgagcacagatggtcctcagccctccactgtcagggtctgacacctaccccaggggccctgccaaactacctcaaagtcaaagcaaatcgggctattcctcaagcagtcaccagtacccgtctgggtaccacaaagccaccttgtaccatcacccctccctgcagagcagttcgcagtacatctccacggcttcctacctgagctccctcagcctctcatccagcacctacccgccgcccagctggggctcctcctccgaccagcagccctccagggtgtcccatgaacagtttcgggcggccctgcagctggtggtcagcccaggagaccccagggaatacttggccaactttatcaaaatcggggaaggctcaaccggcatcgtatgcatcgccaccgagaaacacacagggaaacaagttgcagtgaagaaaatggacctccggaagcaacagagacgagaactgcttttcaatgaggtcgtgatcatgcgggattaccaccatgacaatgtggttgacatgtacagcagctaccttgtcggcgatgagctctgggtggtcatggagtttctagaaggtggtgccttgacagacattgtgactcacaccagaatgaatgaagaacagatagctactgtctgcctgtcagttctgagagctctctcctaccttcataaccaaggagtgattcacagggacataaaaagtgactccatcctcctgacaagcgatggccggataaagttgtctgattttggtttctgtgctcaagtttccaaagaggtgccgaagaggaaatcattggttggcactccctactggatggcccctgaggtgatttctaggctaccttatgggacagaggtggacatctggtccctcgggatcatggtgatagaaatgattgatggcgagcccccctacttcaatgagcctcccctccaggcgatgcggaggatccgggacagtttacctccaagagtgaaggacctacacaaggtttcttcagtgctccggggattcctagacttgatgttggtgagggagccctctcagagagcaacagcccaggaactcctcggacatccattcttaaaactagcaggtccaccgtcttgcatcgtccccctcatgagacaatacaggcatcactgagcagaggattcgtgtaggtggcaaagctagatgaggacatgagaataattcaggagaacaaaaggaaacacagaacatgcaaaaggcctgtgcattctagaccagccaattggtgggacagcgtgatgaccggcagggttcaacagaccagggcatcttcttgtgtcttaaacaggcatctctccactgacagccggtgtggtcacttggagcacggctttaataagtcattattatatttttcagcccttcatccagcaaatcagaaggactcagtacaaactccgttatgatatatcctagccacatgcagggtaacatgtaggattttctatattgaaagaatacttttctggcaaaaaaaaaaaaaaaagaaagaaaggaaaacaaaaagcacttttttcttaatggtagcagtataatgtattttgcaacgaatttgtaatttttctgtacgatagttttgataatttatagtactttgatgtcatgtagccattgtatcagttgaagtaatacttgtttactagaggagtttgaacaaagcctttcctacttttttatccctttaagagaaccaatgattctttaggaactttgaatactgaatgactctcaatcaccgtcagctttagtaaaatctctttcttatcctaacaagtgtcttatttggtggaagaagaattaagagtgatggtgatggtgtgcacgtttcattaatccaaccaaaaataatgaaataaaatttgagccacagtataccactccttgggataaagttaaatatttttaaagatcacattttccatgaacgcctctagtagcaaaccattcttttgcacaccacaatgtttccctcagtgccctttctcaaatgggtacaatgttcccttgtggccaaatttccctcccagggagcaatttcagtgctaggatcattggattcagttcccaaaatagaatgtttcagtgagaccatgagaattccaggctcacaaagggagaggagagaacagggcaagacgtttggtttcatttgtcaccatttttaaaactctgtatgctagcacaccaaactcttgtctatatttacctttgtaccacagtattaatcgctattgttcatgtatcgtgctggaagtctgaactgactctagaggatgaattagcaagagggtattttaccaggtatgatctgacttcagttgtgcccatgttataatgtgtttccgacataggagagtcgtgctgctgtctagatcttcttgaatgttgataaaaatgaatgactactacaatacattttgtgttgcttgttggatgaatttgcatgttaactgtaggccaatatagatttgcctttaaaactctggaagagctacatagtcatcattagtttctattaattatgcatcagacaaaagccatttgttaccaaactgggaaaacagaggcttttcttaactatttcacatactgtaacaaatatgaatttaaatttgtgatagcgctctggttgctctaagcataattaagaatttttgtaattaataggttgctaattatttatcactgctaaaaaggaaaaaaggcataaaatgaccttctactgattagattttcagttttctttcaaactggaaatgcctccataaatatgatctatgattttgcttcataaaacagcaaatcaatgttttatgtaaaatattaaagcattaatataaatatgtgagaataaaaacaatctaaatccagaaaatggcagtcctaaatgttcatgagacagattgtattaatttaaccaggactatgtagaagtagaaagaaaagaaaaagaaaatcttttttaaaccagaataaacattaaaaactattgcagaaaatagtggattttggattccaaacattttcgacagtgtaatggaaatttttctgtaattttcttaccatcgggtattttttaaagtattcattgagtttaccaaaagttactgtagcttaaaaggttttgtgagcactaactattggcagaaactgcatttgcaaataaaaataaatgtttgcctttt

SEQ ID NO: 6707 - DNA, 2510 bp, Homo Sapiens
  NM_178014
gcacctcgctgctccagcctctggggcgcattccaaccttccagcctgcgacctgcggagaaaaaaaattacttattttcttgccccatacataccttgaggcgagcaaaaaaattaaattttaaccatgagggaaatcgtgcacatccaggctggtcagtgtggcaaccagatcggtgccaagttctgggaggtgatcagtgatgaacatggcatcgaccccaccggcacctaccacggggacagcgacctgcagctggaccgcatctctgtgtactacaatgaagccacaggtggcaaatatgttcctcgtgccatcctggtggatctagaacctgggaccatggactctgttcgctcaggtccttttggccagatctttagaccagacaactttgtatttggtcagtctggggcaggtaacaactgggccaaaggccactacacagagggcgccgagctggttgattctgtcctggatgtggtacggaaggaggcagagagctgtgactgcctgcagggcttccagctgacccactcactgggcgggggcacaggctctggaatgggcactctccttatcagcaagatccgagaagaataccctgatcgcatcatgaataccttcagtgtggtgccttcacccaaagtgtctgacaccgtggtcgagccctacaatgccaccctctccgtccatcagttggtagagaatactgatgagacctattgcattgacaacgaggccctctatgatatctgcttccgcactctgaagctgaccacaccaacctacggggatctgaaccaccttgtctcagccaccatgagtggtgtcaccacctgcctccgtttccctggccagctcaatgctgacctccgcaagttggcagtcaacatggtccccttcccacgtctccatttctttatgcctggctttgcccctctcaccagccgtggaagccagcagtatcgagctctcacagtgccggaactcacccagcaggtcttcgatgccaagaacatgatggctgcctgtgacccccgccacggccgatacctcaccgtggctgctgtcttccgtggtcggatgtccatgaaggaggtcgatgagcagatgcttaacgtgcagaacaagaacagcagctactttgtggaatggatccccaacaatgtcaagacagccgtctgtgacatcccacctcgtggcctcaagatggcagtcaccttcattggcaatagcacagccatccaggagctcttcaagcgcatctcggagcagttcactgccatgttccgccggaaggccttcctccactggtacacaggcgagggcatggacgagatggagttcaccgaggctgagagcaacatgaacgacctcgtctctgagtatcagcagtaccaggatgccaccgcagaagaggaggaggatttcggtgaggaggccgaagaggaggcctaaggcagagcccccatcacctcaggcttctcagttcccttagccgtcttactcaactgcccctttcctctccctcagaatttgtgtttgctgcctctatcttgttttttgttttttcttctggggggggtctagaacagtgcctggcacatagtaggcgctcaataaatacttgtttgttgaatgtctcctctctctttccactctgggaaacctaggtttctgccattctgggtgaccctgtatttctttctggtgcccattccatttgtccagttaatacttcctcttaaaaatctccaagaagctgggtctccagatcccatttagaaccaaccaggtgctgaaaacacatgtagataatggccatcatcctaagcccaaagtagaaaatggtagaaggtagtgggtagaagtcactatataaggaaggggatgggattttccattctaaaagttttggagagggaaatccaggctattaaagtcactaaatttctaagtatgtccatttcccatctcagcttcaagggaggtgtcagcagtattatctccactttcaatctccctccaagctctactctggaggagtctgtcccactctgtcaagtggaatccttccctttccaactctacctccctcactcagctcctttcccctgatcagagaaagggatcaagggggttgggaggggggaaagagaccagccttggtccctaagcctccagaaacgtcttcttaatccccaccttttcttactcccaaaaaagaatgaacacccctgactctggagtggtgtatactgccacatcagtgtttgagtcagtccccagaggagaggggaaccctcctccatcttttttgcaacatctcatttcttccttttgctgttgcttcccccctcacacacttggttttgttctatcctacatttgagatttctattttatgttgaacttgctgctttttttcatattgaaaagatgacatcgccccaagagccaaaaataaatgggaattgaaaaaaaaaaaaaaaaaaaaaaaaaaaaa

SEQ ID NO: 6708 - DNA, 1514 bp, Homo Sapiens
  NM_178025
ttccggcaggcgctgcgctgctggggggcgcgggcgaggatggcggcggagaacgaggccagccaggagagcgccctgggcgcctactcgccagtggactacatgagcatcaccagcttcccgcggctgcccgaggacgagccggcgcccgcggccccgctgaggggccgcaaggacgaggacgcctttctgggagaccccgacaccgacccggactccttcctgaagtctgcacggctgcagcggctgccatcgtcgtcgtcggagatgggcagccaagacgggtcgccgctacgcgagacgcgcaaagacccgttctccgccgcagcggccgagtgctcctgccgccaggatgggctcacggtcatcgtcacggcctgtctcaccttcgctaccggtgtcaccgtggcgctggtcatgcagatctacttcggggacccccagatcttccagcagggtgccgtggtgaccgatgctgcccgctgcacttcactgggcatcgaggtgctcagtaaacagggatcttctgtggacgcagcggtggcagcagccttgtgtttgggtatcgtggctccacacagttctggcctgggcggtgggggcgtgatgctggtacatgacatccgacgaaatgagagccacctaattgatttccgggagtccgcaccaggggccctcagggaagagaccctgcaaagatcctgggagaccaaggtggggaccctggtgagaagagagagttcaggggagtctctcttcattgcccttctgctaacccaagcattaatttgctaagtatttaccaggggagtgggaaaaagagttgagcaggattctcttaggctatgagagagtcaggcagcccccaagataaaataatgaactagaaaatctggaaccttacttctctgggaatcttacctatctggcacgtgggaaggaagaaaaaaggctactgagtaccctgaaatgtcacgaagttgatgcaatgaaactcacacatctcactctgagccagttgactataactttcccagcccttgatatattggaagattagaggggaattgccagaagtaaaccaactgtctgctgaaagaaaaagaagatatcgaataacttggaaaaatgggtacttagtgcggtggcaaaagccaaacacacccctgagtcttcagagctcagagtaatggtggggtgaaactgaataggttaaatgaaggtcctttgtccaccgttttaaaaggtagggttgcctgggcacagtggctcacacctgtaatcccaacactctgggaagccaaggcaggaggattgcttgaggccaggagtttgagaccagcctgagtgacatagtgagactttgtctctacaaaaaatgctttgaaattagccaggcacagtagcatgcaccaaggatcgcttgacttgagcccaggagttggaggccacagtgagctatgactatgccactgtactccagcctgggtaacaggaaaaaaaaaaaaaaaaaa

SEQ ID NO: 6709 - DNA, 2640 bp, Homo Sapiens
  NM_178026
ccacttccggcaggcgctgcgctgctggggggcgcgggcgaggatggcggcggagaacgaggccagccaggagagcgccctgggcgcctactcgccagtggactacatgagcatcaccagcttcccgcggctgcccgaggacgagccggcgcccgcggccccgctgaggggccgcaaggacgaggacgcctttctgggagaccccgacaccgacccggactccttcctgaagtctgcacggctgcagcggctgccatcgtcgtcgtcggagatgggcagccaagacgggtcgccgctacgcgagacgcgcaaagacccgttctccgccgcagcggccgagtgctcctgccgccaggatgggctcacggtcatcgtcacggcctgtctcaccttcgctaccggtgtcaccgtggcgctggtcatgcagatctacttcggggacccccagatcttccagcagggtgccgtggtgaccgatgctgcccgctgcacttcactgggcatcgaggtgctcagtaaacagggatcttctgtggacgcagcggtggcagcagccttgtgtttgggtatcgtggctccacacagttctggcctgggcggtgggggcgtgatgctggtacatgacatccgacgaaatgagagccacctaattgatttccgggagtccgcaccaggggccctcagggaagagaccctgcaaagatcctgggagaccaagcctgggctcttggtgggggttcccggaatggtgaaggggctacatgaagctcaccagctctatggcaggctgccatggtcccaagtcctggcctttgcagcagctgtggcccaagatggcttcaacgtgactcatgatctagcccgtgccctggctgaacagctgccacccaacatgtccgagcgcttccgggagacgttcctgccatcgggccgcccgccactacctggctcgttgctgcatcggcccgacctggctgaggtgctggatgtacttggcacctccggcccggctgccttctacgcaggtggcaacctcacactggagatggtggccgaggctcagcacgcagggggtgtcataaccgaagaggacttcagcaattacagcgcccttgtggagaagcctgtgtgtggcgtgtacagaggccacctggttcttagtcccccacctccgcacacgggccctgccctcatcagtgctctcaacatcctggagggcttcaatctcaccagcctggtatcccgagaacaggctcttcactgggtggcagagaccctgaagattgcattagccctggccagcagactgggagatcccgtctatgattctaccatcactgagagcatggatgacatgctcagcaaggtggaggccgcctacctccggggccatatcaatgactcccaggcagcccctgccccactcctgcctgtctatgaactagacggagctcccacggctgcccaggtgctgatcatgggacctgatgacttcattgtggccatggttagctccctgaaccagccctttggcagcggccttatcaccccctcggggatcctgctcaacagccagatgctggacttctcctggcccaaccggacagctaaccactctgcacccagcctggagaattcagtgcagccagggaagcggccactctctttcctgctgcccacagtggtccgacccgcggaggggctctgtggaacctacctcgctctgggggccaatggagctgcgcggggcctcagcggcctgacacaggttctgctgaatgtcctgaccttgaaccggaacctgagtgacagcctggcccgcggccgcctacacccggacctgcagtccaacctcctgcaggtggacagtgagttcacagaggaagagattgagttcctggaagccaggggtcaccacgtggagaaagtagatgtcttatcctgggtccatggcagccgaaggaccaacaacttcatcatcgctgttaaggaccctcggagcccagatgcagctggagccaccatcctgtagagcagcggggtggggcggggtctctgctcccccactttgcatgttcccagagtccctccttctcccaggtttggtctcagggggaccccagggatgccccagatcaggggccagaggggatgcttagcaaacccaatcccagagtaactggaaaattctccatcaggaggcctgtggtggtggtggtggtggtggtggtggtggtggtggtggtgagtgtcagcatctacagtacagccaggcaggcaggaccttgaggaatcagactatctgtctgtgtgtcacctctcctccttcagccatgctggccccgagcttagggatgtgcttgcaaacccttctcaagggtctcacaaccccaacatcttcagactggcctgacctgggccttgtcttccagttcctttctcccattcccagcctcatttcttaaatgactaggaattttttaatggaccatcatagggagggggtgctcctcttttcccaccaggttgaggtgggggccttgcatcgggggtccccagggtatggggtaggggtgggggtgggcaccagctcaggggcttccatttgcaaagggaaattaaagaaagaatgttgcttaa

SEQ ID NO: 6710 - DNA, 10448 bp, Homo Sapiens
  NM_178123
gcccgctccgcccccagcccgccttcctcccgccgcgccctccgcctccgcccgcacctcgctagcgttcccctgtcttccccaacgccccggagccgccggccgctagcgtcagcgccagccagaattaaggaagttcactggagtaaaatggaggcctcagtaatattacccattctgaagaaaaaactagccttcctttcaggaggaaaagacagacggagtggcctcattttgacaattccattatgcctcgaacagacaaatatggatgagctgagtgtcaccttagactacctactcagcattccaagtgagaagtgtaaggctagaggatttaccgtgattgtggatggcagaaaatcacagtggaatgtggtgaaaacagtagtcgtaatgctacagaatgttgttccagctgaggtgtcccttgtttgtgtggtaaagccagatgaattctgggataagaaagtaacgcatttttgtttttggaaggagaaggatagacttggctttgaggttattttagtgtccgccaacaaattgactcgttatatagaaccatgccaattaacagaagattttggtgggagtctcacctatgatcacatggactggttaaataagaggctggtttttgagaagtttacaaaggaatctacatcattattagatgaacttgctttgattaacaatggaagtgataaaggaaatcagcaagagaaagaaaggtctgtggatttaaactttcttccatcggttgatcctgaaacagttcttcagacagggcatgaattgttgtccgaattacagcagcgtcgatttaatggctcagacggaggggtttcatggtctcctatggatgatgaacttcttgcacagccacaggttatgaaattattagattcactccgagagcaatatacccgctaccaggaagtttgtaggcaacgtagcaagcgcacacagttagaagagattcaacagaaggtaatgcaggtggtgaactggctagaagggcctggatcagaacaactaagagcccagtggggcattggagactccattagggcctcccaggccctacagcagaaacacgaagagattgagagccagcacagtgaatggtttgcagtgtatgtggaacttaatcagcaaattgcagcactcttgaatgctggcgatgaggaagatcttgtggaactaaagtcactgcagcaacaacttagtgatgtttgttatcgacaggccagtcagctggaatttaggcaaaatctcttacaagcagctcttgaatttcatggtgttgcccaagatttgtctcagcagttggatggcttattagggatgttgtgcgtagatgtagcaccagctgatggagcatcgattcagcaaactttaaaactgcttgaagagaagctgaaaagtgttgatgtgggattgcaaggtttgcgtgaaaaaggtcaaggtctcctggatcagatctccaatcaggcatcctgggcctatggaaaggatgtaaccattgaaaataaagaaaatgtggaccacatacaaggagtgatggaagatatgcagcttagaaaacaaagatgtgaagacatggtagatgtgcgaaggttaaagatgcttcagatggtgcagttgtttaaatgtgaagaagatgctgcccaggcagtagaatggctaagtgaacttctggatgctctgcttaagactcacatcagattgggcgatgatgctcaagaaacgaaagttttgctggaaaagcatagaaaatttgttgatgttgcacagagcacttatgactatggcaggcagttgctacaggccacagttgtgttatgccaatctttgcgctgcacttctcggtcatctggggatacacttcctcgactgaacagagtatggaaacaatttacaatagcatctgaagagagagtacatagattggaaatggctattgcatttcactcaaatgctgaaaagattttgcaggactgtccagaagagcctgaagctattaatgatgaggagcaatttgatgaaattgaagcagttgggaaatcacttttggatagattaactgttccagtagtttatcctgatggaaccgaacaatattttgggagtccaagtgacatggcttctactgcagaaaacatcagagacaggatgaaactagttaatctcaaaaggcagcagctgagacatcctgaaatggtgaccacagagagctaatagctaccagctacctacagatttgcagttcataatcccgcatgttgtcaacatactacagcattagccaccacaccttaagatgcatttcacagccaaaataagtctcatttcttttcatgacacatttctctttacatgttaacaccttgctactaccaaggcataattacttaacatgcttcgaggctgtagattccaagtatcttaaaagaaggaactataaacattgcactgaaaacttgctttaaagctttacctgacctgtcagtttgtagacaaacaactgataataagctttgaatggtgctaataagagtaggaattctctctattaaaaagaaaaaaaaaagttgcccttcctccacaggtgatttagtaaatttagacagtagttaaactcttgttagtagacagtggtgtcctcaaaattttactttgtaattcttcagaattgattatttttattgtgtcaatacagagaaagcctttcagatctttgatatatcatagtcattaaaagaccttttcctatttgtattgataatgtattaaaagttgtttgtgcttaataaaagacttctttaaacatcttatttaatttagtagttacatcctatttccaaacatgagtgccttatttaaaagggcattcttaggactgtgaggatggtttaatatttgttttttcatggtggttgcatgtattttagacaggaaatacatatgtaagcatgtgtatataataaataagcatgttttatcatgaaaaattattgtgaacaatttagatctttaagaacttattaataatggaatactatttctaatttttctctttttcaacttgaaaaatattctcaaaattattaactaccctgaagatactttgtctttaggggaggagggctgaggaagaaggcatacataattacttcagtgtaatcctttatatcagagtaatctttcaggaactaaaatagcaattgttaataaaatttagtttctcattatagtctaaaagcaaaataaattctgaagtagtccaataacagaactgtatgacccctttagaaataaaatttatcatgaaatgctagttcttttaagtttgtattaagtttaaatggtaaaatgcatataatttaaattttatgtatttttatttcagaacattttttaaaatattaaaaattattttttagtcttgtagtcattacaaaattataaacgagttgtatactggttcctttttgaggtctacaaacatgctcgtgtatcttccaatgcaaaaaaaaaacccctcccttttaacctgctagtttttccagccttcttcactgactgacagacttcttggagaaatccacatccagtgcccctacatcctcatcactcactactcagcaccttgcagtctggttttacacagcactctactgaaactgttcttttgaaagtcagcaatggcctcccagttaccaaactgaatggtttttttctccgtctgaatcccttacccttttctctgcaacatttacaccattgagcaacctttcctagacagtgtctccttccttgaagatgctatcctctgaaataactgtgagtacagtcgcataaccctaatttaagatgtgcctgctgaacatgtgctctctcagatcctgtcctcagaatgcttttggctcttttctcggtatctcatccttagagtttttattttataccaatgttctggattacatacctggtccagaaatctagacttgtacttctttttaattgcctagttgacatttcaaccttgattaaagattgacaatatttatcaccttttcctcctggaacaatttaggttaatggtgcagccttttttcctagtcaaacatgccaggaagttcagggcaaagttcaactgctccctcttgtcttatgtggtcactgcttctgagaacatccaggaagttctttctatacttgaatcatcttctcagtcctttggggctttactgctatgagtatgaacttttgtgattatttatttcagtcttcatgatggtgctatcacattctacagttgtttatgtctgtacccagtaagctcttttgagggaaggaatcttgtcttctcctattcccagtcttgctcatgcataacagatgcccattcctcctaaatatgaatgctgtattataggcattagtaataatccctgttacattgcagtctgaagtatgttttaaacatacttttttaaagttagaactgacttacaagtgaatctattcttagattcttagatactaactactttagatatttagttatactcaataactaaatatcaatactcaatatctgtttcttctgaatttcagagtagttagaatgtttttcttaagactttgctagaaaggaactggtttgttagtaattctgccatcaactcatggagttataattgccaaatgagttaatttttatataccttaagctatcttgcctacaaaaagtaaaataaggcaggattcataaatgttacttgtaaattgagtgtttcacatgaggccaagtatgattttaacataatgaatatcattgctcctcatctgtaaatttgctgctgctttcatatgtgtatctgtacatagagttatgaatgaaaatccagtaatgccctaaagcaactttcttccatagggtcaaagctcacttaaggtaaacgtgtgaaaaaagtgactgcagtgtgtttgaaaccacaagctgtttctatgtcataaattaacatcagcttgcaagtctctgaaagaaccactcatttgtaattggtatatatgtcacaacctcccacattcctttagcccatctcagggaattattgaaacgctggcagggttagtttcattttgttttggtttttttgggtttttttgtttgtttgaggattttttttttcttttatcatttgtttgctcctgtgtaagcttaatatataatggcagtttggcatctgttcttcgcacatgtctaacccagcagagttatgcaaaaatgatgacttcattttaggtcaaattggctttgttcccagtcctcattgttggtcactttgttcagttctggtgactcattggtgatgttgatgaaactgctcagcctgccagctgggatattgatggcaggtctaggcttcattgttaggtagaagattgaatacttctcactttatacaaatttacattggctattgctcccatgtgttagctagtcttaacatgtttgttatttcgttatcttattagctgacatacggagtggtattattagtgtcgtactccttagcgtgagcatgacaattaagttaccttactaacagtgatgagtaaaccatactctgatctaaacccattgttaccaatgatgtgattatgaagttagctgaatctatggtctacatttgaagaaatagttcagaattctctactacattgtaagttacttgctaatagagattgggcattattatgtactactccccttctcacatcctacccaaagtacacaaggccgtagtaaaatactgttgctactaaaaactaaacatactgtggttgctaatgtcctttacatcttcagcctatagggaatggtacaggcagaaacaagcaccattaagtatattatcatcagtagtgagatctgtatgattaggatatctttgcttaagcccccaaaggaaaaattctctagcattaaaaacatggctggaacatagctaagcagttaacctaattagtagacttattgttaacgttcagtcctaaaaatgaaaagcttcagttgggagtagaaaatatactatgctggtatatagagcaacaaataccctgatgagataaaatgaagtagaaacttaccatttgacattatttgactttcatacatgctactgaaaagtctaggtttagctaagaagcataaataatggcagtacttgtagaggaaagaacataccagctaaaacaagaactgtaatgaatataatggaaagtgtttggagcttgaatacttggcttcaaaaatctggctttgccatttactgttaaaaaaatatctgagaatttatctcaggctgtaaaacagagaagtcataccaatttcaagaataaaatatgatataaagaattgttgaagccaaaatatccagaaataaacagaatggaaggtatcattgctataattatcttttcagaataaaaaatagagtattctttatcctttctgttgtctcacatgacaagcatgggatggtgaggaaatggcatattgcctatgttcgccgccccacccccttagttccaccaccccttcaccgtcacccccagttcactagtgtatcagaatgcatcttcagaattacacactgaagatacaaaaggtccagttggtaagctcatcagtaaataacaaggctttgaaatctgacaaattagctatttttgtaggaagataatagaacagcaagatggaagacaagtgatgagtatcatctgttttgaggttgacaaggtgtgacataaccctgttaatagacacaagtaaaagaaaatcatactaggattggatattagtgagcgagcaccgaccagtagaaacaacaacagcataaatctgttatttaagtatcccaataatgaggttaaaaaaaaaaaaaaaacagaacaaagcatgaaaagaccacaattagtgctggctatgcttagagaggagcagtctcttggtaaactcaggcagtgatgatgaacagaaaatggccgactgatactgtaatagaggcatagaactaaggacactccgtgagctggcataaatacaggggagtctttaagactgaaaaaagttcatgggtatgacacttaatatgactcaacattactgcagaattttaaagcaaacatgaaagcttgagaataaacactagtccctctacttcaagaaaaagcagaacctgtactagaacatgaagaacttagagatcaaaagacagccagaactatgatgaaatattttgaaagcagtgggcacatttttaaagattttttttggagaactttatgaggctgtatgtataattcctatatgtaattttataggaattcttaactgaaagtagttatcaactgctacttatcaggagcagtgttattagggattttaagttaggcatgtagaaaactttctgacaaaagggctattgaactccagccagttcccagtgaatctccaggaggcaccttagaagtcttcacaagctgaataccatgtctttagggtgtccaaatgcttctgtcttgggggagagatgagagatgactgggtgcctttccactcagaacacagtagaccactcactatttatgaccaagcctcacttcttttctattacagttacagattcttttttagtctggaagttagggtaaataaaatttgtatgtttgatttttctcttaggaatgttttctcatcttaactcttatgttatctttatggccaacagatttgctcagaatatatcatcaaaatatatgtattgtattttgtaaaggtgaaaggatcgaaataccactttgacagttataaaccagagtagatttgagaactgattgctcacatcacacttacgaatagtctcagaagcctttaagagaaacttacttctcaatggacacttagaagaatttgatgatcttactgtcataaaatcagtaatgaaattctcagcaaaactatttggtaaacattgcaccctgtatttttacccaacatcttgttatgaaaattatcaaatacattaaaaagttaaaataattttatagtgtactcactacctagatgctaattagcattacctatgcttgctttgtcacatatccattcatcatttcatattattatttgatgcattttaaattgcatatcattaactagagttcattgttggcttttttacataaaattagcatgcaatgaagtgcatagaaatatgtgttcactgaggtttggcaaatgcatatagtgctatggaaataggaaacgttatcaccaccctagaaagtttccacactgccctttccagtcaattcctgtccctacttgaccctcaaaggcaaccactgttcctttttctaccataagatttttctgttctaaaactttatataaatagagtcacgcaacatgtacgcttttctacaaggcttcatttttttattgctgttcttttttattgctgagtagtattccactgtatgacaatattacagtttgttttcttaatttcctattattgatagatacctgggctgtttccaggattggccattataaataaagctgctatgaccattcttacgtaagtctttgtgaacataggttttcatttctttgcagtaaattccttggattagaattgctgggtcacagggtagttttaaaagaaactgccatacctttttccagttcagttttattgtgccctgtattttgtattttgatgtgcataaaggtgtaaactatttttatgatccatattgaagtattagaagaagtgagtttggaataacaatggcattgttcatggtcaaggatgacaattggaactatctgaggaaagcaaagacctgtctgccccagacagctcctcaaggggttcctatgcctgaaactttagcaatatttcactccttgaaaggttaaagcccaaccatggtgatatgttagctagaagaaacagcactggtttgtttatgttactaactttcaccacccgttttcagtaggtaaagtaagactgatcattgaacagaaaaggttatttctgtgatgaggttgagggggtagtggaaagcatgtattgctagtaagccccaggtacagctatgtgagagagagtcacctggacagggaagtcccccaaatggtggccagaagagcagaaaacggggtgggaaaaattctacctcacagttttgcataggggatagctatgcttttacgggacattttagcgtttaaaaatattttcaatattgtctctttattcaataccacccagctgtagttttttcacactctgatgactctcttatccactcttttacctctcccagctgttctattacatacagcattcacctgtattagtctatagaattataatcatctgtgtgtttctaatgctcattttcaaaaatatgtatggtttattcgatttttcctattaaaattttaagggctgggaaatttggcttctactgtaaatccttataatgttccacacattgtaaatatgcaataaaaatgttaacaactataatggcagcaggttttggtatgtatttctttgatatattgtcactttggacaataagtttgatttctgttaataaaagttgttcataaaatctagggagaattaagtcacactggtctctataagataatctgatgaattctgcatctttgaatcaatttgagttattttttgtaaaggtttaaattgtttctaacagtgttacctaaaacctttcattaaatcaaaaatgtaacttgtatattctgaaataacctggagtcttagaagacagaggcttctgcttccctctcccgtgaccccaacaatcccttcccacaggcttggcacagaagttcagtgctttctctacgtctcatgttgtcagaaataggttctcaccataatagacagtggtgaaatttccattgttcctactgagaagtccatttttaaggcatcaaaggtgaatgtgtatttagggatggaggaggcatattacaacaaagctgtatttaaaataacacaatcatatcatgctataaacaatagcagttccagaatggctactaaggattttggactgccagactttggaaattggcaagccttataccttgtccaatgaagttaagtacatttgagtgacagttcaacatacaagcaaaaaaatatatagaagacattgtacatttgttattaatggacatgtttactttacatgttagagtatccatccatctctaggttttccattagatgcttcattgtatccacaaacctgtttcaaaccattgaagtgatcttaccattgtgtttgttcaaaataaaattgggagaaaatgtgaa

SEQ ID NO: 6711 - DNA, 1861 bp, Homo Sapiens
  NM_178124
gttcttcgtgaaagggatgacgggagctgtatgaaagcggaagagttatagaccgctaacacctgtcactggccactggtttcccggagttagcggcaacgaccttgcagcctggacactagccaggcgctccctcttctcacagcggcccacgtctccttgcttgggagcccatcgtcctggctccggtggcctcgctgggtctcggggaggcagaggactgttctttcctgtggcgaaaagccggagtcggccctagacacccacgactcgcagggtccatggttccggaggccgtgagacctgccggggctgacaggtgccagggcccatgctgcgggagcctgtgtgctcagccttcttgcggacggtaaagaagctaagtggaagagtgtttcctcctctggccgtaaagcagctgtccccgccctactccggaccgccccaaagactccatgggatggacctgagtcagccgaatcccagccccttcccttgggcctgctgtggtgctggacatcagtgacagacggaagcaggagaccatcaaggctacgggaggcccggggcgcttgcgaagatgaagtttggctgcctctccttccggcagccttatgctggctttgtcttaaatggaatcaagactgtggagacgcgctggcgtcccctgctgagcagccagcggaactgtaccatcgccgtccacattgctcacagggactgggaaggcgatgcctggcgggagctgctggtggagagactcgggatgactcctgctcagattcaggccttgctcaggaaaggggaaaagtttggtcgaggagtgatagcgggactcgttgacattggggaaactttgcaatgccccgaagacttaactcccgatgaggttgtggaactagaaaatcaagctgtactgaccaacctgaagcagaagtacctgactgtgatttcaaaccccaggtggttactggagcccatacctaggaaaggaggcaaggatgtattccaggtagacatcccagagcacctgatccctttggggcatgaagtgtgacaagtgtgggctcctgaaaggaatgttccagagaaaccagctaaatcatgacaccttcaatttgccatcatgacgcagacctgtatacattaggttaaatctgaatttccactgctttggagagtcccacccactaagcactgtgcatgtaaacaggttcctttgctcagatgaaggaagtagggggtggggctttccttgtgtgatgcctccttaggcacacaggcaatgtctcaagtactttgaccttagggtagaaggcaaagctgccagtaaatgtctcagcattgctgctaattttggtcctgctagtttctggattgtacaaataaatgtgttgtagatgactggttagtgtttgaggctttgttctatgttttcccctgatttgttctggtcaaaactcatcaaatgtgtaactagcatccaggcgacaatacagaaagtctgggacctggcactgaatgtttgcctggtagtgactagccgttaatcaaccgactcatccaggatgaagaggacgtcagacttagagcagctgtctgtcctttcaggttactctcactcttctgaaagtgtctgtcagtttctgaagcatgtgtgttacctgcatcacacagctacttcctatcctagcaatacatccaaaatacagctctagtagagtgaggttaacttggaaatgtgatcagtagtgttgttttattttgtagtaattttttttttttttggtgatttagcaaagtttctagttgttatccatgaggatgatgggcatttccccccaggtattgactgcagtgg

SEQ ID NO: 6712 - DNA, 4240 bp, Homo Sapiens
  NM_178129
gcggccgcctttgcaaggttgctggacagatggaactggaagggcagccgtctgccgcccacgaacaccttctcaagcactttgagtgaccacggcttgcaagctggtggctggccccccgagtcccgggctctgaggcacggccgtcgacttaagcgttgcatcctgttacctggagaccctctgagctctcacctgctacttctgccgctgcttctgcacagagcccgggcgaggacccctccaggatgcaggtcccgaacagcaccggcccggacaacgcgacgctgcagatgctgcggaacccggcgatcgcggtggccctgcccgtggtgtactcgctggtggcggcggtcagcatcccgggcaacctcttctctctgtgggtgctgtgccggcgcatggggcccagatccccgtcggtcatcttcatgatcaacctgagcgtcacggacctgatgctggccagcgtgttgcctttccaaatctactaccattgcaaccgccaccactgggtattcggggtgctgctttgcaacgtggtgaccgtggccttttacgcaaacatgtattccagcatcctcaccatgacctgtatcagcgtggagcgcttcctgggggtcctgtacccgctcagctccaagcgctggcgccgccgtcgttacgcggtggccgcgtgtgcagggacctggctgctgctcctgaccgccctgtccccgctggcgcgcaccgatctcacctacccggtgcacgccctgggcatcatcacctgcttcgacgtcctcaagtggacgatgctccccagcgtggccatgtgggccgtgttcctcttcaccatcttcatcctgctgttcctcatcccgttcgtgatcaccgtggcttgttacacggccaccatcctcaagctgttgcgcacggaggaggcgcacggccgggagcagcggaggcgcgcggtgggcctggccgcggtggtcttgctggcctttgtcacctgcttcgcccccaacaacttcgtgctcctggcgcacatcgtgagccgcctgttctacggcaagagctactaccacgtgtacaagctcacgctgtgtctcagctgcctcaacaactgtctggacccgtttgtttattactttgcgtcccgggaattccagctgcgcctgcgggaatatttgggctgccgccgggtgcccagagacaccctggacacgcgccgcgagagcctcttctccgccaggaccacgtccgtgcgctccgaggccggtgcgcaccctgaagggatggagggagccaccaggcccggcctccagaggcaggagagtgtgttctgagtcccgggggcgcagcttggagagccgggggcgcagcttggagatccaggggcgcatggagaggccacggtgccagaggttcagggagaacagctgcgttgctcccaggcactgcagaggcccggtggggaagggtctccaggctttattcctcccaggcactgcagaggcaccggtgaggaagggtctccaggcttcactcagggtagagaaacaagcaaagcccagcagcgcacagggtgcttgttatcctgcagagggtgcctctgcctctctgtgtcaggggacagcttgtgtcaccacgcccggctaatttttgtattttttttagtagagctgggctgtcacccccgagctccttagacactcctcacacctgtccatacccgagggtggatattcaaccagccccaccgcctacccgactcggtttctggatatcctccgtgggcgaactgcgagccccattcccagctcttctccctgctgacatcgtcccttagttgtggttctggccttctccattctcctccaggggttctggtctccgtagcccggtgcacgccgaaatttctgtttatttcactcaggggcactgtggttgctgtggttggaattcttctttcagaggagcgcctggggctcctgcaagtcagctactctccgtgcccacttccccccacacacacaccccaccctgttgctgaccaaggtgatttttggcacatttgttctggcctggcttggtgggaccccacccctattctgcttctgtgagtccctgatagagaaggaggtcccatcaggcccctggaacacactcaggcttccctgactcaggacaaggaccacgggaggcccaggtgcggaaaggaggctccgtgagatggggtccagcccatcccaacacaagggtgcagcttgattcgggagttccccacctcctgcccattctccgcgtccttttaccccatggagagcctcagccatggcaagtccatctggagtccaggaagcaggcaactggcctgacccatgagaccgtttggagaccaagcagcagatgcaggtgtggaccccaggaacctacaggggtgtcagccgctgagccccctccctgctgtgtgggtggtgagcaggctgggtctttgtctgtcttcttctacacggcatgtgcctgcaccagccccaacacctgagctggtttagcgcaaagaagagctctgactctccaggggtgctgggacatcacgtggaattggatcccaggctctcttgggcgagaaagaccattctggaggtgggagtgggagagctgcctgtctgcccacgggctctgcgtctccgcagtgggtggccttggatgcccggcccctccctttctgtgcactggggacgctgatggaggctgaagctgctgttcggaggccctctattggtgcctctctcctgccgtcatcactatggcaggaaaacagagatggtttagtaatgaattatcattcccaaacccgtgtccacctggaacatcaggatgggaccatgtttgaaaatcgggtctttccaaatgtaattaagtaaggcgaggccatactgcatttacaatgggcccaatccagtgtccctatgagagacggaagaggagacacagacacaaagcaggaggccacataaagacagaggcagagactgaagtgatgctgccccaagcccagggatgcctggagtccccaggagctgggagaggcaggaaggaccctcccctagagtctctggagggaactggatacaattgcagagtgcactaaacagttgccccagaaagacatgtcttgttttaaagcccagaacctgaaattattatagattttattcggtaataaggaactttgcatgtgtaattacttaaggatatgaagatgagattgtgctggattattaagcaccctaaatgccatgacaggtgtccttccaagagacagaagaggagacacagacacagagcaggaggacacgtggagacagaggcagactggagtgatgcggccacaagcccagggacacctggagcccccaggagctgggagaggcaggaaggatcctcccctagagcctccagggggaactggaggatgcgtaagagacccagaacttccacagaaggaggaaaattaacctcctgcttctctagactgttccaaagctgaaccctagaaagcaaagctgatacagaagcatccaggctgcaggagtacaggtcgcaagtgctgagcgtgggccttgggtgtgtctcatgggggaaaaaaaactgtgaaaaacctcagagtagcatcttcacagtaacgcacggacgatccctaaactgccttgtaaacaaaaatgagagcttgagtcagaggaagccgagacaatatccttcctcgacaacgtgcgagaaccctgacgtcccccagcaaaggaagacgttgcaagcaggcaaaatgcgtcgattttttttttttgtcagtatgatgatttttgcagccacttggctatggagagcagccgacaccccctcttacagccgtggatgtttcctggaagctgactcagtctgttcactggttgagctttgagtgaaaagataacacaggtctattgactcacacacatgttttaagatggaaaactttacttctgttcttggcaggacatggagagagggagggattccaaaaagtctcagcctccatcaaggcgtggcagctcatgccggtaatctcagcactttgggaggctcaggcgggaggactgattgagtccgggtgttcaagggccaacctaggcaacacagtgagaactcatctctgtaaaaaataaaaataaaacattaaaaaaaaacatgagctttgaagtgcacagggcaaaaaaaa

SEQ ID NO: 6713 - DNA, 2059 bp, Homo Sapiens
  NM_178148
aggcgggaagagcgcggcacttccgctggccgctggctcgctggccgctcctggaggcggcggcgggagcgcagggggcgcgcggcccggggactcgcattccccggttccccctccaccccacgcggcctggaccatggacgccagatggtgggcagtggtggtgctggctgcgttcccctccctaggggcaggtggggagactcccgaagcccctccggagtcatggacccagctatggttcttccgatttgtggtgaatgctgctggctatgccagctttatggtacctggctacctcctggtgcagtacttcaggcggaagaactacctggagaccggtaggggcctctgctttcccctggtgaaagcttgtgtgtttggcaatgagcccaaggcctctgatgaggttcccctggcgccccgaacagaggcggcagagaccaccccgatgtggcaggccctgaagctgctcttctgtgccacagggctccaggtgtcttatctgacttggggtgtgctgcaggaaagagtgatgacccgcagctatggggccacagccacatcaccgggtgagcgctttacggactcgcagttcctggtgctaatgaaccgagtgctggcactgattgtggctggcctctcctgtgttctctgcaagcagccccggcatggggcacccatgtaccggtactcctttgccagcctgtccaatgtgcttagcagctggtgccaatacgaagctcttaagttcgtcagcttccccacccaggtgctggccaaggcctctaaggtgatccctgtcatgctgatgggaaagcttgtgtctcggcgcagctacgaacactgggagtacctgacagccaccctcatctccattggggtcagcatgtttctgctatccagcggaccagagccccgcagctccccagccaccacactctcaggcctcatcttactggcaggttatattgcttttgacagcttcacctcaaactggcaggatgccctgtttgcctataagatgtcatcggtgcagatgatgtttggggtcaatttcttctcctgcctcttcacagtgggctcactgctagaacagggggccctactggagggaacccgcttcatggggcgacacagtgagtttgctgcccatgccctgctactctccatctgctccgcatgtggccagctcttcatcttttacaccattgggcagtttggggctgccgtcttcaccatcatcatgaccctccgccaggcctttgccatccttctttcctgccttctctatggccacactgtcactgtggtgggagggctgggggtggctgtggtctttgctgccctcctgctcagagtctacgcgcggggccgtctaaagcaacggggaaagaaggctgtgcctgttgagtctcctgtgcagaaggtttgagggtggaaagggcctgaggggtgaagtgaaataggaccctcccaccatccccttctgctgtaacctctgagggagctggctgaaagggcaaaatgcaggtgttttctcagtatcacagaccagctctgcagcaggggattggggagcccaggaggcagccttcccttttgccttaagtcacccatcttccagtaagcagtttattctgagccccgggggtagacagtcctcagtgaggggttttggggagtttggggtcaagagagcataggtaggttccagttactcttcccacaagttcccttaagtcttgccctagctgtgctctgccaccttccagactcactcccctctgcaaatacctgcatttcttaccctggtgagaaaagcacaagcggtgtaggctccaatgctgctttcccaggagggtgaagatggtgctgtgctgaggaaaggggatgcagagccctgcccagcaccaccacctcctatgctcctggatccctaggctctgttccatgagcctgttgcaggttttggtactttagaaatgtaactttttgctcttataattttattttattaaattaaattactgcagtggaaaaaaaaaaaaaaaaaaaa

SEQ ID NO: 6714 - DNA, 3210 bp, Homo Sapiens
  NM_178167
gccggatcccggaccatggcggcggcggggggcgccgaggggcggcgcgcggccctggaggcggcggcggcggcagctcctgagcggggaggcgggagctgcgtgctgtgctgcggagacctggaggccacggcgctgggccgctgcgaccacccggtgtgctaccgctgctctaccaagatgcgggtgctctgcgagcagcgctactgcgccgtgtgccgcgaggagctgcgccaggtggtctttgggaagaagcttcctgcctttgccaccatccccatccaccagctgcagcatgagaagaaatatgatatctactttgcagatggaaaggtgtacgcattgtacaggcagctgctgcagcacgagtgcccgcggtgccccgagctgccacctttcagcctcttcggggacctggagcagcacatgcggaggcagcatgagctcttctgctgccgtctgtgcctccagcacctccagatcttcacatatgagcgcaagtggtactcgcgcaaggacctggcccggcatcgcatgcagggtgaccccgatgacacgtcgcaccgtgggcacccgctctgcaagttctgtgacgagcgctacctggacaatgatgagctgcttaagcacctgcgccgcgaccactacttctgccacttctgcgactcggacggggcccaggactactacagcgactatgcctacctgcgtgagcacttccgggagaagcactttctgtgtgaggaaggccgctgcagcacggagcagttcacccacgccttccgcaccgagatcgacctcaaggcccacaggacggcctgccacagtcgcagccgcgccgaggcacgccagaaccgccacatcgacctgcagttcagctacgcgccacggcactcgcgccggaacgagggggtcgttggtggcgaagactacgaggaggtggacaggtacagccgccagggccgagtggcccgggctggcactcgcggagcccagcagagccgccgaggaagctggaggtacaaaagggaagaagaggaccgagaagtagcagctgctgtccgggcctccgtggccgcacagcagcaggaggaggctcgcaggagtgaggatcaggaggaaggcggtaggcccaagaaggaggaggcagcggcgcggggacctgaggatccccgtggcccccggcgctcaccccggactcagggcgaaggcccaggccccaaggaaacctcgacaaatggtcctgtaagccaagaagccttctcggtgacaggcccagccgccccagggtgtgtgggggtgccaggcgccctcccaccacccagcccgaagctcaaggacgaagacttccccagcctctctgcctccacttcctcctcctgctccactgcagcaaccccgggccctgtggggttggcgctgccgtacgccatccctgccagaggcaggagtgccttccaggaggaggacttccccgccctggtgtcctcggtgcccaagcctggcaccgcccccaccagccttgtctctgcctggaacagcagcagtagcagcaagaaggtagcacagcccccactctcggcgcaggctaccggcagcggccagcccaccaggaaggctgggaaggggagcaggggcggcaggaagggcggcccgcccttcacacaggaggaggaggaggacggcggcccggccctgcaggagcttctgagcacacgccccacgggctccgtctcctccacactggggctggcctccatccaaccctctaaagttgggaagaagaagaaagtgggctcggagaagccaggcaccacattgccacagcccccgcccgctacctgtcccccaggggctttgcaggccccggaagctcctgccagcagagccgaggggccagttgccgtcgtcgttaatggacacacggagggcccggcccctgctcggagtgcccccaaggaaccccctgggctcccaaggcccctggggtccttcccctgccccacgccacaggaggacttcccagcgctcggcggcccctgcccaccccggatgccgccgcccccaggcttcagcgctgtggtgctcctgaagggcacgcctcccccacccccgccgggcctggtgcccccaatcagcaagccgccccctggcttctctggccttctgcctagcccccacccggcctgtgtccccagccccgccaccaccaccaccacaaaagcacccaggctgctgcctgccccacgggcgtacctagtccccgagaacttccgggagaggaaccttcagctcatccagtccatcagggacttcctgcagagcgacgaggcccgcttcagcgagttcaagagccactcaggggagttcagacagggcctgatctccgcagcccagtattacaagagttgccgggacctgctgggggagaatttccagaaggtctttaatgagctgctggtcctgctgcccgacacggccaagcagcaggagctcctgtctgcacacacggacttctgcaaccgcgagaagcctctgagcaccaagtccaagaagaacaagaagagcgcgtggcaggccaccacccagcaggcgggcctggactgccgtgtgtgccccacctgccagcaggtgctcgcgcatggcgatgccagcagccaccaggcgctgcatgctgcccgggacgacgacttcccctccctgcaagccatcgccaggatcatcacgtagctcccgccagcgtggccagagctgtcgcaccgtgagcgtccttcctccttcctctccgggctgccaggcagccaggtaaggcctggtgaggccacttggcctcttggttggccaggcccaccaggaagtcaccaggacagtccacccgccctgttggcacactcaagcgggagtccacccctgcctcagtggtgggccagtctcggtttgcattcttgtgcttttgggaggtgccaggggagggaagggctgggatgctgggacctgttgttgctggcaaagccagaggtcacagtggcctgatctgggccctcccaaagctgagggctgcagcccgtggggcctcagagctgaaagctgcggcgccactggtgccagagtcagatgtcacagatgtgttgtgtaaacagttggctgtttcgtgcttcaagaatgttcaggattaaaagcagacaagaaattgtgaaaaaaaaaaaaaaa

SEQ ID NO: 6715 - DNA, 2858 bp, Homo Sapiens
  NM_178170
atggagaagtacgagcggatccgagtggtggggagaggtgccttcgggattgtgcacctgtgcctgcgaaaggctgaccagaagctggtgatcatcaagcagattccagtggaacagatgaccaaggaagagcggcaggcagcccagaatgagtgccaggtcctcaagctgctcaaccaccccaatgtcattgagtactacgagaacttcctggaagacaaagcccttatgatcgccatggaatatgcaccaggcggcactctggctgagttcatccaaaagcgctgtaattccctgctggaggaggagaccatcctgcacttcttcgtgcagatcctgcttgcactgcatcatgtgcacacccacctcatcctgcaccgagacctcaagacccagaacatcctgcttgacaaacaccgcatggtcgtcaagatcggtgatttcggcatctccaagatccttagcagcaagagcaaggcctacacggtggtgggtaccccatgctatatctcccctgagctgtgtgagggcaagccctacaaccagaagagtgacatctgggccctgggctgtgtcctctacgagctggccagcctcaagagggctttcgaggctgcgaacttgccagcactggtgctgaagatcatgagtggcacctttgcacctatctctgaccggtacagccctgagcttcgccagctggtcctgagtctactcagcctggagcctgcccagcggccaccactcagccacatcatggcacagcccctctgcatccgtgccctcctcaacctccacaccgacgtgggcagtgtccgcatgcggagggcagagaagtccgtggcccccagcaacacagggagcaggaccaccagtgtccgctgcagaggtatcccccggggacctgtgaggccagccatcccaccaccactgtcgtcagtgtatgcctggggtggtgggctgggcacccccctgcggctgccaatgctcaacacagaggtggtccaggtggcagctgggcgcacgcagaaagccggcgtcacgcgctctgggcgtctcatcctgtgggaggccccacccctaggtgcaggcggaggcagtctccttcctggggcagtggagcagccacagccccagttcatctcgcgtttcctggagggccagtcgggtgtgaccatcaagcacgtggcctgtggggacttcttcactgcctgcctgactgacagaggcatcatcatgacattcggcagcggcagcaatgggtgcctaggccatggcagcctcactgacatcagccagcccaccattgtggaggctttgctgggctatgaaatggtgcaggtggcctgtggggcctctcacgtgctggccctgtccactgagcgagaactatttgcctggggccgtggagacagcggcagactggggctaggcaccagggagtcccacagctgcccccagcaggtgcccatgcccccaggacaggaagctcagcgagttgtatgtggtatcgattcctccatgatcctcactgtgcctggccaagccctagcctgtgggagcaacaggttcaacaagctgggcctggaccacctctccctgggggaggagcctgtcccccaccagcaagtggaggaggccctgagcttcacactactaggctctgcacccctggaccaggagcctctgctgagtatagacctgggcactgctcactcagctgctgtgactgcctcgggtgattgctacacttttggcagcaatcagcacggacagttgggcaccaatactcgccgaggcagtcgggcaccctgtaaggtccaaggccttgagggcatcaagatggcaatggtagcctgtggggatgccttcactgtagctattggggcagagagcgaagtgtactcttggggcaaaggggcgcgaggtcgattgggaaggagggatgaggatgccggactccctcggccagtgcagttggatgagacacacccttacacggtgacttccgtgtcctgttgccatggaaacaccctcctggctgttcgatcggtcacagatgagccggtccccccctgaggcacccggattcacctctggaccaccctgatattgcttctcctctgaatgctctgaaaagtgcaggtgcccaaggcatgacttgcagctgtctcctggattgtgtcatcatggggtatcagggctggcaaaacccctgctctgcttttggccttggatatggaaacctcaaccactttgttctcctaccacctctttgcccttcctaccccttcctcccttcagtcagtgtccccagggtccagcctggctagagttagaaggcagacctagcctttggaagcagggtggcctccagagccttgccataaaaaggctgaaggcagccgggcgcagtggctcacgcctgtaatcccagcactttgggaggctgaggcgggcggatcacgaggtcaggagatcgagaccatcctggctaacgtggtgaaaccccatctctactaaaaatacaaaaaaattagctgggcgtggtggcacgcgcctgtagtcccagctgctcaggaggctgaggcaggagaatggcgtaaacccctccagcctgggcgacagaaccagactccgtctcaaaaaaaaaaaaaaaacaaaaaaggctgaaggcagctgtagctccacacagaccctaccctttcccctagcccagttagaaaataagtctgggccggcggcggtggctcacacctgcataggcagtgctttggccaggaggatcccttgatcccttgtggccaggagttgggagaccagcctggggaccatagcgagaccgctgtctccaccaa

SEQ ID NO: 6716 - DNA, 980 bp, Homo Sapiens
  NM_178174
cagtgcccaggcaggcccaggagttgacatttctctgcccagccatgggcctcaccctgctcttgctgctgctcctgggactagaaggtcagggcatagttggcagcctccctgaggtgctgcaggcacccgtgggaagctccattctggtgcagtgccactacaggctccaggatgtcaaagctcagaaggtgtggtgccggttcttgccggaggggtgccagcccctggtgtcctcagctgtggatcgcagagctccagcgggcaggcgtacgtttctcacagacctgggtgggggcctgctgcaggtggaaatggttaccctgcaggaagaggatgctggcgagtatggctgcatggtggatggggccagggggccccagattttgcacagagtctctctgaacatactgcccccagaggaagaagaagagacccataagattggcagtctggctgagaacgcattctcagaccctgcaggcagtgccaaccctttggaacccagccaggatgagaagagcatccccttgatctggggtgctgtgctcctggtaggtctgctggtggcagcggtggtgctgtttgctgtgatggccaagaggaaacaagggaacaggcttggtgtctgtggccgattcctgagcagcagagtttcaggcatgaatccctcctcagtggtccaccacgtcagtgactctggaccggctgctgaattgcctttggatgtaccacacattaggcttgactcaccaccttcatttgacaataccacctacaccagcctacctcttgattccccatcaggaaaaccttcactcccagctccatcctcattgccccctctacctcctaaggtcctggtctgctccaagcctgtgacatatgccacagtaatcttcccgggagggaacaagggtggagggacctcgtgtgggccagcccagaatccacctaacaatcagactccatccagctaa

SEQ ID NO: 6717 - DNA, 1929 bp, Homo Sapiens
  NM_178191
gggtgcttggccgtccctgccattagcgcgtaacgagagactgcttgctgcggcagagacgccagaggtgcagctccagcagcaatggcagtgacggcgttggcggcgcggacgtggcttggcgtgtggggcgtgaggaccatgcaagcccgaggcttcggctcggatcagtccgagaatgtcgaccggggcgcgggctccatccgggaagccggtggggccttcggaaagagagagcaggctgaagaggaacgatatttccggtgaggctcaccgggtcccaagtccagccctggatctcccaatggccttccaatccttaaactgccaatcgccccacccgttcctacctggtgccttgggcgccccatcccccaacagaactcccgggccccaatccagtataccctaacccttgatgtcccgaccgttgccacgtatagggcactcccagttacctgcacaacagtttcaggcccccaaaccgtttccaccggcgggtctccaaaacaacccacggctcaactcctcctttatcattaccatctcccgcgtggagttctcctcaggtcgtgcgaaacacccccagattcttcgcacagtgtctagatccgaccgcccaacgtttgcctcccagcctgactccctcggcccttacccacctgtcaccccctctacgctctccttcctcgccagcacgccttagctttgcaagcctgcatgcattcaggcttctcaggtgtttctagacccccgactccgcaagagtgaggatgatgggagctggtcatgggagctacttatggttggacaccatcttctaaaggcttttgccctactcagcccaacctagacctgtagatttccctctcctgcttaggagtatggagtgggctgggcctccctttgccagccttgagttatctttaactgacttctgtccactctggagagcagtgaggaattaatcttgcttttgcttgtcctttggcctttcacttctgccttctgttgagaattatcaccatgacacctgccataccgtatagagagccaaggtacagccgttagagactatctaattgagcccctacattttgtagttaaggaaaactgaggcctaaatgtgaccaaaccaacattgtaatccagtcccttcttggaacctaaattgaactgccaagtactgcgcatgcaagagaccctttattggccttacagtgggccattcatttctataggcaaagaaagctctagacagattggaataggaaatggatatttgccttttagctacacccctttgtctgtcttcctcattttgttcctttttttttccctaaaggggagtcaagttccctgggttgttcccctcataaggtattagggacttgtgtcacatctctctggagttttctattttaaagaggaatctgaaagcaataagctctttggtcttcttaagatggctacacctcaatttaagatggggtattctttcactagttgaggagtagaagaggatgaccagctagactcccatggaattggaactcctattccttgcttagacattacaggttatgctttgagatctctttggggtgaaggattgaaattaaaccctgagccaccgtgtccttgtagagcacagagtagagaacaactggcagctttgaaaaaacaccatgaagaagaaatcgttcatcataagaaggagattgagcgtctgcagaaagaaattgagcgccataagcagaagatcaaaatgctaaaacatgatgattaagtgcacaccgtgtgccatagaatggcacatgtcattgcccacttctgtgtagacatggttctggtttaactaatatttgtctgtgtgctactaacagattataataaattgtcatcagtgaaaaaaaaaaaaaaaaaaaa

SEQ ID NO: 6718 - DNA, 1893 bp, Homo Sapiens
  NM_178232
cccgaaatcagactgctgccttggaccgggacagctcgcggcccccgagagctctagccgtcgaggagctgcctggggacgtttgccctggggccccagcctggcccgggtcaccctggcatgaggagatgggcctgttgctcctggtcccgttgctcctgctgcccggctcctacggactgcccttctacaacggcttctactactccaacagcgccaacgaccagaacctaggcaacggtcatggcaaagacctccttaatggagtgaagctggtggtggagacacccgaggagaccctgttcacctaccaaggggccagtgtgatcctgccctgccgctaccgctacgagccggccctggtctccccgcggcgtgtgcgtgtcaaatggtggaagctgtcggagaacggggccccagagaaggacgtgctggtggccatcgggctgaggcaccgctcctttggggactaccaaggccgcgtgcacctgcggcaggacaaagagcatgacgtctcgctggagatccaggatctgcggctggaggactatgggcgttaccgctgtgaggtcattgacgggctggaggatgaaagcggtctggtggagctggagctgcggggtgtggtctttccttaccagtcccccaacgggcgctaccagttcaacttccacgagggccagcaggtctgtgcagagcaggctgcggtggtggcctcctttgagcagctcttccgggcctgggaggagggcctggactggtgcaacgcgggctggctgcaggatgccacggtgcagtaccccatcatgttgccccggcagccctgcggtggcccgggcctggcacctggcgtgcgaagctacggcccccgccaccgccgcctgcaccgctatgatgtattctgcttcgctactgccctcaaggggcgggtgtactacctggagcaccctgagaagctgacgctgacagaggcaagggaggcctgccaggaagatgatgccacgatcgccaaggtgggacagctctttgccgcctggaagttccatggcctggaccgctgcgacgctggctggctggcagatggtagcgtccgctaccctgtggttcacccgcatcctaactgtgggcccccagagcctggggtccgaagctttggcttccccgacccgcagagccgcttgtacggtgtttactgctaccgccagcactaggacctggggccctcccctgccgcattccctcactggctgtgtatttattgagtggttcgttttcccttgtgggttggagccattttaactgtttttatacttctcaatttaaattttctttaaacatttttttactattttttgtaaagcaaacagaacccaatgcctccctttgctcctggatgccccactccaggaatcatgcttgctcccctgggccatttgcggttttgtgggcttctggagggttccccgccatccaggctggtctccctcccttaaggaggttggtgcccagagtgggcggtggcctgtctagaatgccgccgggagtccgggcatggtgggcacagttctccctgcccctcagcctgggggaagaagagggcctcgggggcctccggagctgggctttgggcctctcctgcccacctctacttctctgtgaagccgctgaccccagtctgcccactgaggggctagggctggaagccagttctaggcttccaggcgaaagctgagggaaggaagaaactcccctccccgttccccttcccctctcggttccaaagaatctgttttgttgtcatttgtttctcctgtttccctgtgtggggaggggccctcaggtgtgtgtactttggacaataaatggtgctatgactgccttccgccatcccca

SEQ ID NO: 6719 - DNA, 1934 bp, Homo Sapiens
  NM_178276
gtttttacccaggcctcggcgcctaggcgcttcgccgaggctgatcttcgttcaagtgtgagctgcggctgagcccagcgctcgaggcgcgaggcagccaggagggcccgtgcggcgcggggagccagcgagcgcgccttcggcattggccgccgcgatgtcagctcagtgctgtgcgggccagctggcctgctgctgtgggtctgcaggctgctctctctgctgtgattgctgccccaggattcggcagtccctcagcacccgcttcatgtacgccctctacttcattctggtcgtcgtcctctgctgcatcatgatgtcaacaaccgtggctcacaagatgaaagagcacattcctttttttgaagatatgtgtaaaggcattaaagctggtgacacctgtgagaagctggtgggatattctgccgtgtatagagtctgttttggaatggcttgtttcttctttatcttctgtctactgaccttgaaaatcaacaacagcaaaagttgtagagctcatattcacaatggcttttggttctttaaacttctgctgttgggggccatgtgctcaggagctttcttcattccagatcaggacacctttctgaacgcctggcgctatgtgggagccgtcggaggcttcctcttcattggcatccagctcctcctgctcgtggagtttgcacataagtggaacaagaactggacagcaggcacagccagtaacaagctgtggtacgcctccctggccctggtgacgctcatcatgtattccattgccactggaggcttggttttgatggcagtgttttatacacagaaagacagctgcatggaaaacaaaattctgctgggagtaaatggaggcctgtgcctgcttatatcattggtagccatctcaccctgggtccaaaatcgacagccacactcggggctcttacaatcaggggtcataagctgctatgtcacctacctcaccttctcagctctgtccagcaaacctgcagaagtagttctagatgaacatgggaaaaatgttacaatctgtgtgcctgactttggtcaagacctgtacagagatgaaaacttggtgactatactggggaccagcctcttaatcggatgtatcttgtattcatgtttgacatcaacaacaagatcgagttctgacgctctgcaggggcgatacgcagctcctgaattggagatagctcgctgttgtttttgcttcagtcctggtggagaggacactgaagagcagcagccggggaaggagggaccacgggtcatttatgacgagaagaaaggcaccgtctacatctactcctacttccacttcgtgttcttcctagcttccctgtatgtgatgatgaccgtcaccaactggttcaaccatgtaagaagtgcctttcacctcctgccatgattctgaggcctccccagccatgtggaactctgagaaacctgaacggactccatttggctccttcatttgcaagacatcaagggctccttacccacccccttcctcaaggaattaacttgtgcaagctgactcccagcacatcaaagaatgcaattaactgataacatgctgtggcaagctatgtccgcagttcccaggaatttgtccagttgatattaccctaagcccctgtgtttttgtctggttgatagcacccaaagcccagcgtctatcaccttgtgatggatttaaagcccctgcacctggaactgtttgctttcctgtaaccatttgtctttttaacttcttttgcctgttttacttctgtaagactgctacagctaggctccccctcccctctctaaaccaaagtataaaacaaaatctagccccttcttcagggccgagagaattttgagcactagccgtctctcggtcgctggctaataaaggactcctcaattcg

SEQ ID NO: 6720 - DNA, 998 bp, Homo Sapiens
  NM_178324
gcgcttgtgacccgccttccggaaggaagcggctaactatggcgaccgccacggagcagtgggttctggtggagatggtacaggcgctttacgaggctcctgcttaccatcttattttggaagggattctgatcctctggataatcagacttcttttctctaagacttacaaattacaagaacgatctgatcttacagtcaaggaaaaagaagaactgattgaagagtggcaaccagaacctcttgttcctcctgtcccaaaagaccatcctgctctcaactacaacatcgtttcaggccctccaagccacaaaactgtggtgaatggaaaagaatgtataaacttcgcctcatttaattttcttggattgttggataaccctagggttaaggcagcagctttagcatctctaaagaagtatggcgtggggacttgtggacccagaggattttatggcacatttgaatgaagatgaaggatcattgatttccttgtgtatggataatccgggaacaggccaactaaatatttgatgaatgtatgatttcaaatacagtgaattccctgggagtcatcaaagaagaccggcattttatggttgtttttattaagtgtatattctttgctcctgaaaatgttattaaataattgtttaggccgggcatggtggctcatgcctgtaatcccagcactttcaaaggctgaggcaggcagatcacctgaggtcaggagttcaaaaccagcctggccaacatgctgaaacctcgtctctactaaaaatacaaaaattagctgggcgtggtggtggatacctgtaatcccagctacgtgggaggctgaggtgggagaattgcttcaacctgggaggcagaggttgcagtgagccgagatcatgccactgcactccagcctgggcaacagagcaagactgtctcaaaaataaataaataaataaaattgtttaaataaaaaaaaaaaaaaaaaaaaaaaaaaaaaa

SEQ ID NO: 6721 - DNA, 1717 bp, Homo Sapiens
  NM_178329
ctgatggtatctctgtttcaggagtggtgacgcctaagctatcactggacatatcaaggacttcactaaattagcaggtaccactggtcttcttgtgcttatccgggcaagaacttatcgaaatacaatagaagtttttacttagaagagattttcagggagaagtgaaatgacaacctcactagatacagttgagacctttggtaccacatcctactatgatgacgtgggcctgctctgtgaaaaagctgataccagagcactgatggcccagtttgtgcccccgctgtactccctggtgttcactgtgggcctcttgggcaatgtggtggtggtgatgatcctcataaaatacaggaggctccgaattatgaccaacatctacctgctcaacctggccatttcggacctgctcttcctcgtcacccttccattctggatccactatgtcagggggcataactgggtttttggccatggcatgtgtaagctcctctcagggttttatcacacaggcttgtacagcgagatctttttcataatcctgctgacaatcgacaggtacctggccattgtccatgctgtgtttgcccttcgagcccggactgtcacttttggtgtcatcaccagcatcgtcacctggggcctggcagtgctagcagctcttcctgaatttatcttctatgagactgaagagttgtttgaagagactctttgcagtgctctttacccagaggatacagtatatagctggaggcatttccacactctgagaatgaccatcttctgtctcgttctccctctgctcgttatggccatctgctacacaggaatcatcaaaacgctgctgaggtgccccagtaaaaaaaagtacaaggccatccggctcatttttgtcatcatggcggtgtttttcattttctggacaccctacaatgtggctatccttctctcttcctatcaatccatcttatttggaaatgactgtgagcggagcaagcatctggacctggtcatgctggtgacagaggtgatcgcctactcccactgctgcatgaacccggtgatctacgcctttgttggagagaggttccggaagtacctgcgccacttcttccacaggcacttgctcatgcacctgggcagatacatcccattccttcctagtgagaagctggaaagaaccagctctgtctctccatccacagcagagccggaactctctattgtgttttaggtcagatgcagaaaattgcctaaagaggaaggaccaaggagatgaagcaaacacattaagccttccacactcacctctaaaacagtccttcaaacttccagtgcaacactgaagctcttgaagacactgaaatatacacacagcagtagcagtagatgcatgtaccctaaggtcattaccacaggccaggggctgggcagcgtactcatcatcaaccctaaaaagcagagctttgcttctctctctaaaatgagttacctacattttaatgcacctgaatgttagatagttactatatgccgctacaaaaaggtaaaactttttatattttatacattaacttcagccagctattgatataaataaaacattttcacacaatacaataagttaactattttattttctaatgtgcctagttctttccctgcttaatgaaaagcttgttttttcagtgtgaataaataatcgtaagcaaca

SEQ ID NO: 6722 - DNA, 3023 bp, Homo Sapiens
  NM_178422
tgaattcaaaacagttactctgaatggtctttgctaagaacaatttaatgattaagtaaggtcagtgtccttggaagtccaaactctagccagatttccctggtctacacccctagggataaggtaaatgtttaagcacacagtgaacttcctgaggcccccaaatctaatggaactagctattgagggctaaaagaggatggtttttttagaaaactcgaagcaaatctctcaggctggggatatttcaaagactactactattattattaataacaattgcaatatttgttgagtccctaaatgaagctaaaactttgttctaataaatttaatctttacagcaacctatgaggtagataatattgtcattcccatgagggagctaaggatcagagaaggtaagtcacttgtctaaggtcacatagctagcatgttatgcaatcaggagtcaaacctggtttgtctgaatctgaagtccatctgctctgtgcacttttataccgtctgctttttcctttattcctaaccttcttccattctgattcccactgagtagtggacaggaaccactgaagtttgcctgacaccatcaaccaggccctagtcacctggctttgcctttgccctgctgtgtgatcttagctccctgcccaggcccacagccatggccatggcccagaaactcagccacctcctgccgagtctgcggcaggtcatccaggagcctcagctatctctgcagccagagcctgtcttcacggtggatcgagctgaggtgccgccgctcttctggaagccgtacatctatgcgggctaccggccgctgcatcagacctggcgcttctatttccgcacgctgttccagcagcacaacgaggccgtgaatgtctggacccacctgctggcggccctggtactgctgctgcggctggccctctttgtggagaccgtggacttctggggagacccacacgccctgcccctcttcatcattgtccttgcctctttcacctacctctccttcagtgccttggctcacctcctgcaggccaagtctgagttctggcattacagcttcttcttcctggactatgtgggggtggccgtgtaccagtttggcagtgccttggcacacttctactatgctatcgagcccgcctggcatgcccaggtgcaggctgtttttctgcccatggctgcctttctcgcctggctttcctgcattggctcctgctataacaagtacatccagaaaccaggcctgctgggccgcacatgccaggaggtgccctccgtcctggcctacgcactggacattagtcctgtggtgcatcgtatcttcgtgtcctccgaccccaccacggatgatccagctcttctctaccacaagtgccaggtggtcttctttctgctggctgctgccttcttctctaccttcatgcccgagcgctggttccctggcagctgccatgtcttcgggcagggccaccaacttttccacatcttcttggtgctgtgcacgctggctcagctggaggctgtggcactggactatgaggcccgacggcccatctatgagcctctgcacacgcactggcctcacaacttttctggcctcttcctgctcacggtgggcagcagcatcctcactgcattcctcctgagccagctggtacagcgcaaacttgatcagaagaccaagtgaagggggatggcatctggtagggagggaggtatagttgggggacaggggtctgggtttggctccaggtgggaacaaggcctggtaaagttgtttgtgtctggcccacagtgactctctgtgcacgactcaactgccaagggcatcactggccaattcttggatttagggattggctaggagttgctggggtccactcctgggcctgccccagctccttgcccagggagagggaaagagttaacggtgtgggccactccagcttgcccttccactgccactcactggggtgaggctgggggtcagcttggtgaggattggggcttctagattgtctaggcaggaggtgaaacttaggccagagtcagatttgagctgagccaggggaggccttggcaacctacttctactcagatttcattgctggatgcggaaggggtaggcccaaaatatatacaggatcttactgtcccttgaagcccagccacaagtgttggagctgcagagagaccccaaaggtagtagattgtgccagatacaaatgggtcccatccagtgcttcatactccttcagtcactatcccagacagtgagccccagatctcctagctctggcttctgtgtcccacacggcctgttcccagcttctctcctggttcccttgttacggattcatttatccattcagtgtttcctgggcctctgctcagaggcaggtcaccactgggccctgtggatcaatgcaagatgacaaaggctttttttttttttttttttttttttttttttgaggagtttcgctcttgttggctaggctggagtaaaatggtgcgatctcggctcactgcacctccgcctcccaggttcaagcgattttcctgcctcagcctcccgagtagctggggttacaggcatgcaccaccatgcctggctaattttctgtatttttagtagagacggggtttctccatgttggtcaggctggtcttgaactcctgacctcaggtgatctgcccgtctcggcctcccaaagtgctgggattaccggcatgagccactgcgcctggccgacaaaggctttgatatcagaatgaactgtcaagggaggtgctggagagggattaacctgtgctgcctgggaccctcagggtcttaggttggggagtgtgaataggagtttgcagatggagaataggaagggcattccaggcagagggaaacctgtgcagagaccaagaggtgtggaaggaaaagtggggttggggctgggtggtctggattatggcctggatgcaataaagtactgtgacagtagcca

SEQ ID NO: 6723 - DNA, 2382 bp, Homo Sapiens
  NM_178432
gggggcgggggcagataggaggtgcctgctgtcatcgttccgtgggccctgctgcgggcacgctctcggcgcatgcgttttttatgcgggattaagcttgctgctgcgtgacagcggagggctaggaaaaggcgcagtggggcccggagctgtcacccctgactcgacgcagcttccgttctcctggtgacgtcgcctacaggaaccgccccagtggtcagctgccgcgctgttgctaggcaacagcgtgcgagctcagatcagcgtggggtggaggagaagtggagtttggaagttcaggggcacaggggcacaggcccacgactgcagcgggatggaccagtactgcatcctgggccgcatcggggagggcgcccacggcatcgtcttcaaggccaagcacgtggagccgagggtgggctggcagtgtctgccttctatcctgcagactggcgagatagttgccctcaagaaggtggccctaaggcggttggaggacggcttccctaaccaggccctgcgggagattaaggctctgcaggagatggaggacaatcagtatgtggtacaactgaaggctgtgttcccacacggtggaggctttgtgctggcctttgagttcatgctgtcggatctggccgaggtggtgcgccatgcccagaggccactagcccaggcacaggtcaagagctacctgcagatgctgctcaagggtgtcgccttctgccatgccaacaacattgtacatcgggacctgaaacctgccaacctgctcatcagcgcctcaggccagctcaagatagcggactttggcctggctcgagtcttttccccagacggcagccgcctctacacacaccaggtggccaccaggtctgtgggctgcatcatgggggagctgttgaatgggtccccccttttcccgggcaagaacgatattgaacagctttgctatgtgcttcgcatcttgggcaccccaaaccctcaagtctggccggagctcactgagctgccggactacaacaagatctcctttaaggagcaggtgcccatgcccctggaggaggtgctgcctgacgtctctccccaggcattggatctgctgggtcaattccttctctaccctcctcaccagcgcatcgcagcttccaaggctctcctccatcagtacttcttcacagctcccctgcctgcccatccatctgagctgccgattcctcagcgtctagggggacctgcccccaaggcccatccagggcccccccacatccatgacttccacgtggaccggcctcttgaggagtcgctgttgaacccagagctgattcggcccttcatcctggaggggtgagaagttggccctggtcccgtctgcctgctcctcaggaccactcagtccacctgttcctctgccacctgcctggcttcaccctccaaggcctccccatggccacagtgggcccacaccacaccctgccccttagcccttgcgagggttggtctcgaggcagaggtcatgttcccagccaagagtatgagaacatccagtcgagcagaggagattcatggcctgtgctcggtgagccttaccttctgtgtgctactgacgtacccatcaggacagtgagctctgctgccagtcaaggcctgcatatgcagaatgacgatgcctgccttggtgctgcttccccgagtgctgcctcctggtcaaggagaagtgcagagagtaaggtgtccttatgttggaaactcaagtggaaggaagatttggtttggttttattctcagagccattaaacactagttcagtatgtgagatatagattctaaaaacctcaggtggctctgccttatgtctgttcctccttcatttctctcaagggaaatggctaaggtggcattgtctcatggctctcgtttttggggtcatggggagggtagcaccaggcatagccacttttgccctgagggactcctgtgtacttcacatcactgagcactcatttagaagtgagggagacagaagtctaggcccagggatggctccagttggggatccagcaggagaccctctgcacatgaggctggtttaccaacatctactccctcaggatgagcgtgagccagaagcagctgtgtatttaaggaaacaagcgttcctggaattaatttataaatttaataaatcccaatataatcccagctagtgctttttccttattataatttgataaggtgattataaaagatacatggaaggaagtggaaccagatgcagaagaggaaatgatggaaggacttacggtatcagataccaatatttaaaagtttgtataataataaagagtatgattgtggttcaaggataaaaaaaaaaaaaaa

SEQ ID NO: 6724 - DNA, 4158 bp, Homo Sapiens
  NM_178450
ggcgcgtcccgccagcctgccctcggccgcaggcgactggacggcggttacggggcggtcccagcgccaccacgactggctgtcggctccgccagtcatgggctgatgacgccccggggctggctccgcccctagcggcagccccgcctcccctccagagcctggtcggcttagccctgctttccgcctcactcgttgagcaggtccgtgaattgtcagcgcgctgtgggcgactgtgtggccgcggcggccgccaggcttgccgcactccccctgaggtgcccgccggaaccaatgtgccctggtccactgggccgtgagcagccaccgactgggggcaacttggcacttagaaccgcagcagggacgtcggtttgctatcgggactcggcgaggacgatggaaatcctgtatgaatgtggaagccattagcagagtaattgctgtctgttaccatgacaaccagccgctgcagtcacctgcccgaagtcctgccagactgcaccagctcagctgcacccgtggtgaagacggtggaggattgtggcagcctagtgaatgggcagccgcagtatgtcatgcaagtttcagccaaggacgggcagctgctgtcaacagtagtgcggactcttgccacccagagccccttcaatgaccggccgatgtgcaggatctgccacgagggcagcagccaagaggacttgctctctccatgtgaatgtacagggaccttggggacaattcatcggagctgcctggagcactggctgtcatcctcaaacaccagctactgtgaactctgccacttcaggtttgcagtcgagcgcaaacccaggccgttagtggagtggctgagaaaccctggcccccagcatgagaagcggactctgtttggcgacatggtgtgcttcttgtttataactcccctggccaccatctcgggctggctgtgcctgcggggcgccgtggaccacctgcactttagtagtcggctggaagccgtcggactgattgcactcactgtcgcactcttcactatttacctcttttggacactagtgtcatttaggtaccactgtcgattgtacaacgagtggcgtcggaccaatcagagggtgattctcctcattccaaagtctgtcaatgtaccttctaaccagccgtccttgctgggcctccattcggtcaagaggaactcaaaggagacagttgtttgatgtttgtatggttggttggttgtttgattcattgtttggggtttggaagtgtctgcactggggtcatgcactgagcgacccccaagcccttccttaagcctgtgggtctaagaacatccagagcatattagcacatcactccaagcaacaacctccgccagaagaaagcaaatgctgttttacttcaaatgatggatgctgcaatcatatgatatttgctaagctgccaaacatgtttatttagcagatactgtatggaattttctgaacacctctttaacgtatgaggaaggttgtcctgctacggatgcaattcaattcttccttttttattactatttcaaacacacacacatatatatatatattaaacttagatgataatcaaaatcaaaaagtcaacgtaaaaactggtttcttggtttggttgggtcttatttgagttagtttgtttctcagtttctcgtatggattctttggggtactttggtagcctgagtggtctttttcatctctttcgcgtccattactcaaggagacagcataacagatgcagaacaagtcatatttgaagaatgttttgtactaaacttcatttaattattcagtttttaaagggaaaaagggcgtgagctcacacagtgagctgtttatttaaatatcattaaggagaaaaaaaaatatggtgagaagctcgctcctttcaacttgtttggtactgacagctgatagaagctattttctaataataaacatccagtgtgtgaaagacaaaacccactgattgcaatactctttttttaatgataaaacctgtgaagtttcccaaagcaggttttaaaaggaaaaaaaggaaaagcaaaaaggttgctgttctcactcccatctcatttagtgcatgtcttaattcgggattcgtaatgaattggaggatcattagacatttctaggaaccctagacctgttttgcatgtcaattagcattcccattgctctattgaatttctagcttgacaggtagatgtggcaaaaaaaaaaaaaaaaaaaaaagcctgtcctagcagccctgcacttattctaagacccctttgtctgattctttaaaaaggagccccacacagtgccttcccccaaccatgagccaattctgtcacagtccgaaatagactttttctaagggtttcgtgtccctcttttatccgtcgcagtgtaaagggtctgatccgcagcctgcattgtgcgcgcaccgaggcaggagcggatgtcttctgaggagagcgctggctggggttgactctcaggctcccggctgtccgcccgcccacacgcagcgaggaggggcggagccctgcttccggaatgcttaaaatatggaattctagaacatgacccacattctgagtatcactccagcatctgccttgtgttccaagtgggaaaacgagaagtgcaaaggaacaggcagcgaggagggtagcgatttttgtctgcaaattgatggagctgatgcaggtgtcccctttgtaggcgagccctccattcactggctgctcccagcgctgcctggggagggaaacagctgtactgctctccgctgcaaaactcagatgtgctttatggcttgtgacaatagatttcctccccaccacgcttcactgggacacttcaattccagtaatatatgtctcagcccttctgtttactgcgccctgctcacccccctgggctgtcattagctgcaccaccatcaaccgtttcttaattgacctttttaaaatgctggacatcaccggctgcacgcagctgccacacattaaatttccagagcaaagagtccaacttggtagctggtgaattgcagccctgtaatatacttaataaatgacgtccacccagccttagtccctgagctgtcaggtgaacccgtgacacgtctcaactgaatggcacaacattcatgagaggaccataccccttctccctgtttcttgcatgaattaaggaagcagcggatttccaggatgatttcctgtcaaggttggctgcagagaattcctgccatcttggttcatgagatgagatatgacatcatcaaaggcagccaggtcccaggccgttcaatggggatcctgcattaggaagggtttgcacattaaaactgtgcctgtgccacacctctttccttcgtgtttgcatccctgccctgtgaagtaaaacagagtccaagatgcaaggagtagattgtgtgtggggtggtgaaaggacacccctggcagccaggcagagcatcagtgcctcccttcccaggtcaccagcttgggacctccttgtgagaggctctgatctccatcagcatcagggcccataggggattctgaactcttggaggatatttcatcccctccaagccttgccccatggaaagggctacacctcctgcaggaaggggtgccttttgttaacaggtattaatgggtacagaggcaccatgcagcctaccagcacccttgctagcctagtcctcttcctgtgcttctttttgaaagatcaagaatgaagaggaagagatgaggagtgggggtcctttacctaaaggaccctcgtggttcattgcttctctttaactgactttttaaaaaaactccctcttccacactccttgctgtgattctgtcctaatcatttttcttgagaatgtcatgtagagataaatgtgtgtcacagtgaagccagaaggtgaattaacaactaagacaaatccagcatgctcttgcctgccctgcatatgtgctcatttggggaaggacggaggacacagagcatcgacacaaattctacagctcctcagagaacacagcagagactcagatgagctgtaaaatccattaaggaaaaataaatggcatgatttggaagttaaaaaaaaaaaaaaaaaaaaaaa

SEQ ID NO: 6725 - DNA, 712 bp, Homo Sapiens
  NM_178453
cacagagggctccagcgtgattgccactggttaatgacctgccacccccgcccccccaacctctggtgccgtccaaggactctgaccccagtgcagtgtctgtagggaagaggagccatggggcttcgggcaggccccatcctgcttctgctgctgtggctgctgccagaatgcggccactccaaggaggccgggaggattgtgggaggccaagacacccaggaaggacgctggccgtggcaggttggcctgtggttgacctcagtggggcatgtatgtgggggcttcctcatccacccacgctgggtgctcacagccgcccactgcttcctgagggtgactccggggggccgctggtctgccccatcaatgatacgtggatccaggccggcattgtgagctggggattcggctgtgcccggcctttccggcctggtgtctacacccaggtgctaagctacacagactggattcagagaaccctggctgaatctcactcaggcatgtctggggcccgcccaggtgccccaggatcccactcaggcacctccagatcccacccagtgctgctgcttgagctgttgaccgtatgcttgcttgggtccctgtgaaccatgagccatggagtccgggatcccctttctggtaggattgatggaatctaataataaaaactgtaggttttttatgtgaaaaaaaaaaaaaaaaaaaa

SEQ ID NO: 6726 - DNA, 9404 bp, Homo Sapiens
  NM_178457
atggaggttccagaacccacctgccctgcccctcctgcgagggaccagccagctcccactcctggccctccaggggccccaggtggccaggcctcacctcacctgaccctgggccctgtccttctgccgccagagcagggcctggccccccccactgtgttcctgaaggccctgcccatcccactgtaccacacggtgcctcccgggggcctccagccccgcgccccgctagtgacgggcagcctagatgggggcaacgtgcccttcatactcagccctgtgctgcagcctgaagggcctggccccacccaggtggggaagccggcggcccctacgctgacggtgaacatcgtgggcactctgcctgtcctgtcgccgggcctgggccccacgctgggcagcccaggcaaggtgcggaatgcgggcaagtacctgtgtccgcactgtggtcgcgactgcctgaagcccagtgttctagagaagcacatccggtcccacacgggtgagaggcccttcccgtgtgccacctgcggcatcgcctttaagacccagagcaatctctacaagcacaggcggacgcagacgcacctcaacaactcccggctgtcctcagagtccgagggcgccgggggcggcctcctggaggaaggggacaaggccggagagccccccagaccagagggcaggggcgagagcaggtgccaggggatgcacgaaggcgcctcggagagacccctttctccgggtgcccacgtgcccctacttgccaagaacctggatgtgaggaccgaagctgctccctgtccagggtccgcatttgccgacagagaggctccttgggactctgcccccatggcgtcacctgggctcccagcggccagcacacaaccctggcgtaagttgccagagcagaagtcgccgaccgccgggaagccgtgcgccctgcagcggcagcaggcgacggcagcggagaagccctgggatgccaaggcccccgagggccggctgcggaagtgtgagagcaccgactcggggtacctgtcgcgctccgacagcgcggagcagccgcatgcgccctgcagccccctgcacagcctttcggagcacagcgccgagtccgagggggagggcggcccgggcccggggccaggggtcgcaggggccgagcccggggcgcgagaagccggcctggagctggagaagaagcggctggaggagcgcatcgcccagctcatctcccacaaccaggcggtggtggacgatgcccagctggacaacgtgcggccccggaagaccgggctgtccaaacagggcagcatcgacctgcccacgccctacacctacaaggactccttccactttgacatccgcgcgctggagccaggccgtaggagggccccgggccccgtgcgctccacctggacgcccccagacaagtctcggcccctcttcttccactccgtccccactcagctctccaccaccgtggaatgtgtccccgtcaccaggagcaactcgctgcccttcgtcgagggctccaggacgtggctggagcccagggagccccgggacccctggtccaggacgcagaagcctctgagccccaggcccggcccagcccgcctgggctgccgctcgggactaagctcgactgacgttcccagtgggcatccccgggccctggtcagacaggccgcggtggaggacctgccaggcacccccattggcgatgccctggtgcccgcagaggacacagacgcaaagagaactgctgcgcgggaggccatggccggcaagggcagagcgggcggcaggaagtgcggccagagaaggctgaagatgttctcccaggagaagtggcaggtgtacggggatgagacgttcaaaaggatctaccagaaaatgaaagccagtccccatggaggcaagaaagccagggaggtgggaatgggcagtggggcagaactgggctttcctctgcagaaagaggcagcagggagctcaggcacagtccccacccaagacaggaggacccctgtccatgaggacatatccgcaggggcaacgccagagccttggggaaatccaccagccctggaggcctccttggtgactgaacccactaagcatggggagacggtggccaggagaggagacagtgaccgacccagggtggaagaggctgtgtcatcccctgcactgggtggcagagacagtccctgttcaggcagtaggagccccctggtctctccaaatgggaggctggaactggggtggcagatgcccccagcacctggccccctcaaagggggtgatgtagaggctcccaggccagtttggccggaccccaagctggaaggaggtgcccgaggtgtgggggatgttcaggagacctgcctgtgggcccagactgtcctgagatggcccagcaggggctcaggggaggacaagctcccctcagagaggaagaagctgaaagtggaggacctgcacagctggaagcaaccagagcctgtgagcgcagagaccccaggtgggcccacgcagcctgcctctttgtcatcccagaagcaggatgccgatcccggggaggtgccagggggctcaaaggagagtgccaggcaggtgggcgagcctctggagtcctctggagcctccttggctgctgcttctgttgccctgaagagggtggggccaagggacaaggctaccccactgcatcctgcagccccagcccccgcagagcacccctcgctggccaccccacctcaggctcctagagtgctctctgccctggcagataatgccttttcccccaagtacctcctcaggttacctcaggcagagacccccttaccactgcccattccctggggaccaaggcacagccaggactctctctgcagcagtgggtggcctgaagaacgggcatcatttgttgggtcaggactggggacccctctttctcccagcccagcctcaggcccctccccaggtgaggcggacagcatcctggaggaccccagctgttccaggccacaggatgggagaaaaggggcacagttggggggggacaagggggacaggatggccactagcaggccagcagccagggagttgcccatctcagcaccaggggctcccagggaggctacctcctccccgcccactccaacgtgtgaggcacacttagttcaggacatggagggtgacagccaccgtatccatcgcctctgcatgggcagcactttggcaagggccaggctctctggggatgtcctgaatccctgggtacccaactgggagctgggggagcctcctgggaatgccccagaagatccttcttcagggcccctggtgggccccgacccgtgttcccccctccagcctggctccttcctcactgccctcactcggcctcagggtgtgcccccaggctggccagagctggccttgtcttcccactcagggacgtcccggagccacagcacccgcagtccccacagcacccaaaacccctttccctcactgaaggctgagccgcggctcacgtggtgttgcctgagccgcagtgtccctctgcccgcggagcagaaggcaaaggcggcatctgtgtacttggcggtgcactttcctggtagcagcctccgagatgagggtcccaatggccctcctgggagcaatggaggatggacctggacaagccctggagaaggagggccggcgcagatgtccaagttctcctacccaacagtcccaggggtgatgccccagcaccaggtgtctgagccagaatggaagaaaggcctgccttggagggcaaagatgtctcgtgggaacagcaagcagagaaaactgaagatcaaccctaaaaggtacaaagggaatttcttgcagagctgtgttcagctgagagccagtagacttcgcacaccaacctgggtgcgaagaagaagccgccaccctcccgcacttgagggactgaagccatgcaggacccctgggcagacctcttcagaaatagcaggtctgaatctgcaagaggagccatcttgtgccacctcagaatcacctccttgttgtgggaaggaagagaagaaggaaggtgactgcagacaaaccttaggaaccctctctcttggtacaagttcaagaattgtcagggaaatggacaaacgaactgtgaaggatatttctccatctgctggtgagcatggtgactgtactactcacagcactgctgccacatcaggattatctctgcaatctgacacctgcctggcagtggttaatgacgtgcctctaccccctggcaaaggtcttgaccttgggttgctggagactcagctgctggcctcccaggattcagtctcaacagatcccaaaccatacatcttctcagatgctcaaaggccttcttcctttgggtccaaaggaacttttccccaccatgacattgctacctctgtggctgccgtttgtatttctctgccagtgagaacagatcacatagcccaggaaattcacagtgctgaatcacgagaccacagccagactgcagggaggactctgacatcaagctccccagacagcaaagtcacagaagagggcagagcacagaccctcttgccagggagaccttcatctggacaaagaatttcagattcggttccactggagtcaactgaaaaaactcatcttgaaataccagcttcaggaccaagttcagctagttcacaccacaaggaagggagacacaagacgttttttccttccagaggccagtatgggtgtggggaaatgactgtcccctgcccctctttaggaagtgacggtaggaaacgtcaggtatctggattaatcactcggaaagattctgtggttccttctaagccagagcagcccatagaaattcctgaagccccttctaaatccctcaagaagaggagtctggaaggaatgagaaagcaaactcgagtagagttcagtgacaccagcagcgacgatgaagaccgattagttatagaaatatgaagcttccagagaaacatggtgtctggtcaaaaagactgttgacgcttcacaagtaaatgttgtcaggctggcggaagaactaaactctatctgtgaaacacctacagattaggaaagccattttgagttatttacaagccaactccaaccaacttctgacccccaactcagccgcagcgttccccagctccccttgggagtgctctgctcatcttcaaatggtgccaggcagggcagacatggcaaggaagcaaactctgcaaatggtcaacgtgcacagtgactgggccttgactcccagcctcgtcttctgcacctgtcccccactgcctctctgcaatcaaatggcactaaccaagaaagccaccatcaacacatttctccacaagtggaccccacacagtcgaggcaactggctttctccattagtaaactgaggatttgcttccaaggtggagagcacacttgggataattggagtagcttgacaaagagacgggggtgtgaactgggcacaaagatacttctgttcattttggagacaaaattcagatacattaaaaaactgaagcttgttcagagtaattcacgtccttggtggagttgtaaatacacttcaaaatgcctatgatccggtgacatgctgattacttttaaatgttgcacaaatggtcaatgcttatttatggtcagatgatgcaagcacatgctcttgtgcctggtgcgtttgctgtggagatctctgagactgtcggtttttctagttcttgcaaaggaacggtgttaaaagttaatagaactgtctctctgtaatgagtcattttttgagagggaaaaattcacttattttcctctgattcttcttgtcatattgtgctctgagcaatttcaattagagggttacattttagtaatctgtacagcttcaactgatgcctgctcgtcgtgacgggagccttttagatttccttcagaagcttcaaggatacaaaactaattggagttttgacgctgttttacatctcggtaattttattttcggggcttagtgttactttgctgtcaaattaaatcagcctctgtattgtgcacgtcagaactgcacagagaaaattccccagtattccaagccggtgcgcccctgtgcagaagaaaacagatctacgtcagccagcccggggggcaaagcctcagttccactgccttcctctccctctccttccacgggagaggagaaacttaaagaggtttacattgctgcatttcaataaaattttatacttgcttttggtatgattttgtacaatttgaaatttgtagctgagctcttttggtgtaactttgatgtaatgatgttcatatgacatcttgtacttcagagacacagcagcaatgcagagcatctcacacatgtgaatacacttcagtcagtctgtgcctgtgactaagtatggtcaaatttcaagtatcttcatgtgaattttccaattttggtgtttttcatagaaaacttcaatgccagaccagcttccctggttacttagcatatatttgtgaccatttcatatgcactcataaatatccaaggatttcaggcccagccaagaaaaacataagaagggaggtaaaaaggatgttggacattgacttagtgtactttttaaacccaacaaaagcgatgtggtgattatctcccttttcgaaggattcatgccactgtaatgagagaggcagtgtaggcaaatggtctgagccttggatggagattgaagtcctgactttagctgggaaatcttggttaagagtctttctgtaccttagtttccctaagtgagaataagagagttggacaagacgaatgtatctccaggttccaatttttctgagaatggttgatagagaagctgctctctccttaaaatgcatggactcaatggcttgaagatattccccatggggaaccattgccacggaggccttgcatgcaagaagtttgggtggggacagtgaggaactgaaacacaagcaccttccaccaattattgctgtgaagaacctgagcctgaagaagctccatctaattttttccccagagttccagattttagggtgcaatcatccagcctatacatgtggctcatagttcaaaaaattaaaagcaaaaccagaactctccagtaggaatggagaaaacctatctgtaggctgaactggctcctttgtcttaggaggcactggtcaggggaaaaaagctgtcttccagacccctcctttctgggtggctactgtggaatcaacggggtcactggctgtaaatcagtaagtcatagctccaaacagcaccaacttcaggatgatggtggaagctctgtccctataggagccaccgttgccagctgtcacatcccaacctaggtcaaatatggcggaatattgatttcgtctctaactccctgtatctcttacaaaggtaaagcaggtagcgaagccaccttgcttccctggtctttgcctagtggctggcaatgtttacaagtgtaccttactttatatcaacatgaatttgtgaaaaagctgtatgtcaatggattttttaaaaattaaaaatgtattttgaatgaccctaagggagctggctctttaaaagcatcctaaggtaaagattttttttaaatgaagaatctttttataaagcaatgaacaatctctgattttataaatcttaattttcctatgggttttcttaaagtgaaatacaattataagaatacattttaagggtaacattaacaacctagaacccagtttgggttactaaaaataaaatgtcagtattatcaattgataactaccacagttttatactctgcaagtgtgtactgcatgatggttaaggaaaaacaaatttattttagaacaaagcaaaccagagtttaaagatcagggatttccttctttccccagtgctaattttcccagtgttaattttattatatctttaggtaagggtcttaaccaactgatgcctcagtttcttccacagagaatagttagagggatgctgtcatgaactaagggaagggcactgaatttttttttgccaatatcaaaagtgacatttccccatgatgttcaagactcaccaggtttctctctccacctgtacctacacccagctagatcttgtcgttaaagatgtatggagggaagaggtttcaatccttccctccttggcaacctacattgttaagtgactcaaagtcatgtgatttttggtggacaactggaatcctccttcttgtaaaacacattgaaaaacagctcatctctcctgttaggcttaacccttgagatttgagacaaagctaataatcccctttggttcacatctcacagtaaccaggagaacctatggttcatttgccaagtgattaaaaaaaaagatggaggagggtgtctctgaattttaatggaaacactgccaatagcatggtgggtaacctagggcaagacagactttttcttcctgaaatcactcttctaaagctgagaccggaagaggaaccttgcagaagtgcactgtgaccacagttcttggcatgaaagataaacaatttgcagtctcatgccaaaaagtatttccttgcatttacattcattacttagaatgatcacattattcatttttttccccagcacagaaatttgcattttgcacagaatttgcctggtgcagcagatctttatagttatggaaactgtcatcattatcggaatgtgctgctgctcaactccccagacataatttaatatggtgaggagaatatgacctgcctggctctatgggtgatcatatttctactgctgcagcaagctgggcttgtgtatttttcctcacttcagttgttcttcccatagttcatgtagggaggcactttggcttttgaaacactacatttctcaatatttaagcacaatttattgtccttatttttcagaacccattaaatataagggtcagaacctagaaaatcttatgtgctggatttctaccctgtatgattcttttcatccatgctttgcacttacgtaggaatatacataatttggtctgaagaagtataggaacagttgagcacattacttcaccactggaagaataggaaccagggaaaaacatcagcctctgccacttggagcactagaggatgacggaatgtcttgtatatgcggtcaactgttcaggatttactactcaattggttgttcacaatcagggaaatgattggcttcttggttgtttgttgaactttctttctttatatggttaaattattttgttttgataaaaataaaacttaaaatgcaaa

SEQ ID NO: 6727 - DNA, 868 bp, Homo Sapiens
  NM_178460
ccaggacaggcattcaggcagagcaagctccaggtttcaccacaatgcccatccctgcctccccactccacccacctctgccttccttactgctgtatctgctgcttgaactggcaggagtcacacatgtgttccatgtgcaacaaacggagatgtcacagactgtatcaactggggagtcaatcatcttgagttgcagcgtacccaataccttaccaaatggacctgtcttgtggttcaagggaacagggccaaaccggaaattaatctacaatttcaaacaaggtaactttcccagagtaaaagagattggagacaccaccaagcctggcaacacagacttttccacccgcatccgtgaaatctctcttgctgatgctggcacctattactgcgtgaagttcataaaaggaagagctatcaaggagtaccaatcaggtcggggcactcaggtgtttgttactgagcagaatccaagacctcccaagaacagacctgcaggcagagcaggctccagggcccaccatgatgcccatacctgcctctcggccctgcctgagagaaacagcacaaactatttcgtccaaccctgctgctgcctccggctgctgggactcacaggcttgctgtcaaaataatccaaacagggaaggaacgtacaagtaaataacaaaagcccccatactcttctgactccctggagacagctactttttaggagtttcatttgccttcttcaagagagctttcttccactgacataaaatgccagcttgatcgtacaataaatctgtctatttacctgggtccaaaaaaaaaaaaaaaaaaaaaaaaaaaaaaaaaaaaaaaaaaaaaaaaaaaaaaaaaa

SEQ ID NO: 6728 - DNA, 3388 bp, Homo Sapiens
  NM_178496
agttggctctacgaccgccgttgccgctgccagagagggccagggcagggcagggacgcgcagcatcggggcgggcgtggggccggagaaaagggtgtcggggccacacacgcaccctcgctgcagtccagctcctcccgaagctcgcacgcccagagcgcacggagcgggggactgcccgcccagacgcccgcccgccaacccgcccacgagccggggccaaagcctgggagcctgcgaggggaggaggcccaggggggcggggtggggggcgggggtgggtgccgcgctgccgcggagctgctactcggcgcgttttgcatgaagatggcggctcccaccgccaacaaggcagcctccctgggctgtaacaacaagcctgcgttcccggagctggatttcaggtcgggagctcgggtggaggaattgaacaaactcatccaagaatttacgaagcacgaccagcgggaatacgacgaccagagagcgctggagattcacacagccaaggatttcatcttttccatgctgggaatggtgcaaaagctggaccaaaagcttccagtggctaatgaatacctgttgctctctggaggtgtccgggaaggcgtggtggacctggacttagatgagcttaatgtctatgcccggggtactgactatgatatggactttaccctcttggtgccagccctcaagctgcatgaccgtaatcagcctgtgacactcgacatgcgccactcagccttgtgccactcttggctgagccttcggctctttgatgaggggacaatcagtaaatggaaagactgctgcaccattgtagatcacatcaatggtgccaccaactacttcttctcacctaccaaagtggctgactggttctatgactctatcagcattgtcctatcagaaatacagaagaaaccccagcgagggatgccaaaggtagaaaaggtggaaaaaaatgggaccatcatctccatcattctgggtgtagggagtagtcgcatgttgtatgatattgtccctgtggtatctttcaaaggttggcctgcagtggcccagagctggctcatggagaaccacttttgggatgggaagattactgaggaagaggtcatcagtgggttttacttggtgcctgcttgctcctacaagggtaagaaggacaatgaatggcggctgtcctttgccaggagcgaggtgcagttgaagaagtgcatctccagcagcctcatgcaggcctatcaggcctgcaaagccatcatcattaaactgctgtcccggcccaaggctattagcccctatcacctgcggagcatgatgctctgggcctgcgacagacttcctgccaactacttggctcaagaagactatgcagcccactttttgctgggcctcatcgatgacctgcaacactgtctggtcaacaagatgtgccccaattatttcatccctcagtgcaacatgctggaacatctgtctgaggagacagtcatgcttcacgcccggaagctgtcctctgtgcgctcagacccggcagagcacttgcgcaccgccattgagcatgtcaaggcagccaaccggctgacactggagctccagaggcgaggtagcaccaccagcatcccctctccacagtctgacggaggggaccccaaccagcctgatgaccgtttggcaaaaaaactgcagcagctagtgactgagaacccgggaaagtcaatctctgtctttatcaatcctgacgatgtcacaaggccccatttcagaattgatgacaaatttttctgagtgttagctgacttttttttttcctgattcttaaactctgataatgtgtcgtgtggtttgtgatgctatctttctgttttttacatatccagcctagattggatttgttaagaacaaattttaagtttcctggttctgcaggatggtgcaggctctgaaacagtatattactatttcatattctgcctctgatttcgttgtttactttttgtagttattgtcatgctctttagtttgttggagttttttttctttttaaggagatcttaagccatagatgaaaatgcccatgaatcctcttgcttttttctgtttcatacttggtgcaaatttgttcatgggtatggggaaacaaatctctttctgatgcttaacgattctatcctattatttttattattttgtttttgtcttttttcttatgagctttcaccactactgatatttgagaatcatatgaacctgggaactacttggcatgttagctggatttatttattttggccagtgaccagagtagtttccccccttttccaccaaacaatgtaaactttgaaagtgataatactacaaattgtgttttggagcaacttcattgaatgtaattgtcctcaaatcagagaacactgggtggtttgaagggtgtctttgacagttttccaagcagaattaaggtttccaaatgttaattttagcatatgtaattatttgaagccttatttaaatcctattaaagaacataccattataattattatttgcactaatctttgccattgtcagaattgcaaagtgtgtttcaatataaattaacaaccactctcgaaattctatcattttttcattttgcccatttctatcagtgaaatgattctttgcatttgcttagttctccttcagttgtggggtcctgctttgccctctttgatattcctggttcctgtcttactgagagaagttgttaaagctttatacatgttgaccccatctaaagctggggaaaatatacacttgatgaagtaggtgtctttgtatttatttcttttggggtcatagaggtaagcttttttgtaaaatctctactcttcctgagagttttgagaaaaactggcaggaagaacttataatccccaaatagaagataccacgtctgttcaaaagcaggtattgctatagagcagcacccaggaaatatctgtgggtggcagccttggtatagaggtgtcctgtcttcatgagtgaagttacttgcctgattaggtgctggaaggtattggctccctgttttggtgtggactcatggcaagctggtgtttaagaggtcaggaggcctgctgatctttcaaaggacacccatgatgtctactcatagaaagggcaagtaacgtgttcattttggtcttgaatgtccaaactcaagggttggattttggccaattgaaatcagacatatgcgatcttgggtttttgcatggaaattaatgtaatgcttataaatgaaaaatgaaaacatttcaaccatctaagtcaaacacaaaaataataaaaaaagaaacatactggccttgaaaaaaaaaaaaaaaaaaaaaaa

SEQ ID NO: 6729 - DNA, 2029 bp, Homo Sapiens
  NM_178502
ctcagtcatgtgaccggcaatggcggcgctgacgagagctgcatttggaagtgttgtggagacagccccgtagcccaatgcgaccagactcagggaaaacatcaggcccctccagctgagcccttgtgtgagccccgcccctccctaaatgccagacttgggagctgacagacagcactgcctgtgctgggtttaaaagtcctggtcagctgagtggaaatagaaggatttctgctgccatcatcttccatgggctttccaggtcacacgacctacaagtagggagcagggaaagaagagtgagcctgcatgccaattctaagctcttcaggatcaaatgtcgttcgtcctgtccagaatggcagcctgtggaggcacctgcaagaacaaagtgactgtgtccaagcccgtgtgggacttcctgagcaaagagaccccagcccggctggcccggcttcgggaggagcaccgtgtgtctatcctcatagatggcgagacttctgacatctatgttctccagctttccccacagggtcctcccccggcccctccaaatgggctctacctagcccggaaggctctcaaggggctgctaaaagaggcagagaaagagctgaagaaagctcagaggcagggggagctgatgggctgcctggctctggggggtggaggggagcaccctgagatgcaccgcgcaggcccaccccctctccgagcagccccacttctgcccccaggagctcgggggctcccccctcctcctccccccctgcccccacctcttcctcctcgccttcgggaggaggcagaagagcaggagagcacctgccccatctgtctgggggagatccagaatgccaagacattggagaagtgccggcattcattctgcgagggctgcatcacccgggctctgcaggtgaaaaaggcctgccccatgtgcggccgcttctatgggcagctggtgggcaaccagccccagaatgggcggatgctggtctctaaggacgccaccctcctactgcccagctatgagaagtacggcaccattgtcatccagtacgtcttcccgcccggtgtccagggggctgaacacccaaacccaggagttcggtatcctggcaccacacgggtggcctacctcccggactgccctgagggcaacaaggtgctgaccctgttccgcaaggcgtttgaccagcgtctcaccttcactatcggcacgtccatgaccacagggagaccgaatgtcatcacctggaacgacatccaccacaagaccagctgcacagggggaccccagctgtttgggtacccagaccccacctacctgacccgggtgcaagaggagctgagagcgaagggtatcacagatgactgaaggacatcgcctttgccaaggcccctgctgtctgcctctactaggacccagcagaagcctctttctcctctctgccccctgccccccacaccacacctgtaggggacctgtctgactgggaagggagttccgagagggagggggcaatcccttcccccatcccccactggccaagtgtttcaatgcagtgtgagccactcccttctggcagaggccgacctccaaggctctgttctcccctccccgtgtacatatactcccggtttccctgcccctccattgcccttggctttttctggtatgtgctgtgctccacgaccaagccgagaaaggacctagggtggggaagggagggtctcttgattcctaaccgcccccacatactgctccaccgctgaacttcgggtgccggggaggagaaattgggctgatgtgagctccccgtcacccgccatggagccggctgtgtgtgttcatcagatacagttctcccttaaccttgtcctttctctcctgtgtctcagtctccgtcagtctgtctttctccgctcttctctgacccctgtgaggaacctccttaccctgttctggaatcgctgccagactgtagcttttaatttaataaaaataaagtaaaatatgcaactc

SEQ ID NO: 6730 - DNA, 1957 bp, Homo Sapiens
  NM_178507
cccggggccgcggagccgggccggggcagcgccgtctccgcctcggggccgccgggggcgccctgctgagcgctacccacgtgcgtccgcgccacctcgcgggcgaccccgcggccaaggcccccggcggagcggctcccgggcgccccgaactagcccccaactttgggcgaagtttgcctgcgcctctccccgcccccacgcggcgcgccggggccgcggacggcagcggcccccggggatgcgccttcccggggtacccctggcgcgccctgcgctgctgctgctgctgccgctgctcgcgccgctgctgggaacgggtgcgccggccgagctgcgggtccgcgtgcggctgccggacggccaggtgaccgaggagagcctgcaggcggacagcgacgcggacagcatcagcctcgagctgcgcaagcccgacggcaccctcgtctccttcaccgccgacttcaagaaggatgtgaaggtcttccgggccctgatcctgggggagctggagaaggggcagagtcagttccaggccctctgctttgtcacccagctgcagcacaatgagatcatccccagtgaggccatggccaagctccggcagaaaaatccccgggcagtgcggcaggcggaggaggttcggggtctggagcatctgcacatggatgtcgctgtcaacttcagccagggggccctgctgagcccccatctccacaacgtgtgtgccgaggccgtggatgccatctacacccgccaggaggatgtccggttctggctggagcaaggtgtggacagttctgtgttcgaggctctgcccaaggcctcagagcaggcggagctgcctcgctgcaggcaggtgggggaccacgggaagccctgcgtctgccgctatggcctgagcctggcctggtacccctgcatgctcaagtactgccacagccgcgaccggcccacgccctacaagtgtggcatccgcagctgccagaagagctacagcttcgacttctacgtgccccagaggcagctgtgtctctgggatgaggatccctacccaggctagggtgggagcaacctggcgggtggctgctctgggcccactgctcttcaccagccactagagggggtggcaacccccacctgaggccttatttccctccctccccactcccctggccctagagcctgggcccctctggccccatctcacatgactgtgaagggggtgtggcatggcagggggtctcatgaaggcacccccattcccaccctgtgccttccttgcgggcagagagggagagaagggctccccagatctacacccctccctcctgcatctcccctggagtgttcacttgcaagctgccaaaacatgatggcctctggttgttctgttgaactccttgaacgtttagaccctaaaaggagtctatacctggacacccacctccccagacacaactcccttccccatgcacacatctggaaggagctggcccctcagtcccttcctactccccaacaaggggctcactatccccaaagaaggagctgttggggacccacgacgcagcccctgtactggattacagcatattctcatctctggccccgaggctgcctgtggggcgagtggagacctcccatcactgagacagatcacagaccacgagtgcctttcccggacctggacgttgcctccagagcaggcaccagctctttccctctctacacagaaatatttttgtaaggttctggggcagggagggagcatgaagtacgaggaaaacttgaattccagatttttagtgcaaagtatttatcatttctaccagaaataaacgttttaagtttttacttgaaaaaaaaaaaaaaaaaaaaaaaaaaaaaaaaaaaaaaaaaaaaaaaaaaaaaaaaaaaaaaaaaaaaaaaaaaaaaaaaaaaaaaaaaaaaaaaa

SEQ ID NO: 6731 - DNA, 2505 bp, Homo Sapiens
  NM_178516
ctttctgttgatggccttggggagggaggagcctcggtgggaagaaggggcttctgggtggggagtgggagagagacttccttggggagaggaattcagctgcacgctggagtcagctggagttgcccaggccctgtgagcaagtggcaggcgtgcccagctgcattggggagagggctgttctcaaggccaaggtcatttttggagggagaactggacgcctgatcaaatctggcccacaatggactcagcagccaaggatgagatgcagccggcgttgtcccctggacctgagtggccagagcaggagcgggcagagcagctggcccggggtgcagcgctcaagtgggcctcaggcatcttctaccggccggagcagctggccaggctaggccagtaccgcagccgcgaggtgcagcgtacctgctccctggaatcgcgcctcaagtcagtgatgcagtcatacctggaaggcgtgcagactggtgtgtggcagctggcccaggccattgaggtggtgcagggaacccgggaggccctgagccaggcccgtgggttgctccagggcatgtcccaggccttacagactctagagcccctacgggagcgggttgcccagcacaagcaactgcaggccctgtctcacctgctgcctcggctgcgggcagtgccggctgcagtgtcccacacacagactctgattgatggccaacagttcttggaggcatatgtgagccttcgggagctggagcagctgcgagaggatacgtgggcacccctggggggcctggagttgccagtcttccaggggctggaccttctgttcgaggcactgggccaggctgtggaagcagctgcaggggccgcagggaagctggcacgggaggacccagccctgttggtggctgctgtgcgtgtggcggaggtggagactggacgaacaacccccctgggccaggtcccccgggactggcgtcagcgctgtctgagggcactacaggagggcctggagcaggcccactttgggtcacctctgctgcctgcaccaggggccctaccagggtggctggaggctctgcgagtggccctgccagtcgagttggccacagctgaggcactagtagcgccttgctgcccgccacagtacaacgtggtccagctatgggcccacacgctgcatagtggtttgcgccgcagcctgcagaacctccttgcagggcctgagctagaagctgcggatgccttcgccttgctgcactgggcactgcatgtgtacctggggcaggaaatgatggggagcctggagttggggcctgaggctgatgtgtcccagctggagccccttctgaccttggagaacattgagcagctggaggcaacatttgtggccaacatccaggcaagtgtgtctcagtggctgcagaatgcactggatggggaggtagctgagtggggccgggagcatgggcccaacacagacccgtctggctcctattactcaccaatgccagccattgtgctgcagatcctggaagagaacattcgtgtggccagcctggtcagtgagtcactgcaacagcgagtgcatggcatggcactgtcagaactgggcacattcttgaggagcttcagtgatgctctgatccgattctcccgagaccacttcagggggaaatcaatggcccctcattacgtgccctacctactggccgccctcaaccacaagtcagcactcagctcctcagtgtctgtcctgcagctggacggggcgccttcaggggccttggctccagtggaagctgcgctggacgagttgcagaggaggatctaccgcttggtgttggaggcgctgcaggcggagctccagcccctgttcgcggatctgccctcgcgccaatggctgtcgagccctgagctcctgcaaagtgtgtgtgaacggacggggcgcttctgccgggacttctggcgcgtgcggaaccccacggttcagctgctgctggctgaggccgagcgtgccgtggtgctccagtacctgagcgcgctgatgcaaggccgcctggtgtgccgcggagccgacgagaggacccaggcggccgagcgcctgcggcacgatgctgcccagcttcagcagcttttcctcagtttgggcctggaggagaacgcgcactgcgcgccggtgctgctcgccctgagggagctgctaaacctccgcgaccccgcgctgctgggcctggaggtggctggcctgcggcaacaatttcccgacgtgagcgaggaccacgtctccgccctcttgggcctgcgcggggacttgtcccgggagcagcacctggccgcgctcagctccctgcaggctgcgctgccgccgtcgccccgcgcgagccgccgcgtcctcttcagcctagtgcccgcgcccgcgctcgcgccggcctcctgcctgccctcggggtcctgcgcccgagccctgctgctcgcagaataaaccacggctgccggaaaaaaaaa

SEQ ID NO: 6732 - DNA, 2255 bp, Homo Sapiens
  NM_178517
acgtagaccgtctgctgggggcgccggcaccatttggagtacgtgaggaagaaaaatgtctgaaaagcagatgaaggaagcttttgtcagtaacctcaatggaaccaccgtgctggaaatcacccagggattgtgctttcctgcattctgtatcctgtgcagagggttcctgatcattttctcacagtacttgtgttctttttcacctacctggaaaactagattcctcactgactttgttgtcctaatagttcccatggtagccactttgaccatttgggcttcatttatcctccttgagcttctcggtgtaattatctttggggcagggctgttgtatcaaatataccgaaggaggacctgctatgccagactgcctttcctaaaaatccttgaaaaattcttgaacatcagtctagaatcagaatacaatccagccatctcctgtttccgtgtaattaccagtgcgtttactgctattgctattttggctgtggacttcccactttttcccagaagatttgccaaaactgagctctatgggacaggagcaatggattttggagtaggtggctttgtttttgggtctgcaatggtttgtctagaggtcaggaggagaaaatatatggaagggtccaaattgcattactttacaaactcattgtactctgtttggccattagtcttcctaggaatcggacgattagccattataaaatcaataggctatcaggaacatttaacagagtatggagttcactggaactttttctttaccataatagttgtgaaattgataacaccactgctgttgattatttttcccctaaataagtcctggattattgccctcggcattactgtattataccagctagcccttgactttacctcactgaagaggttaatattatatggcactgatggtagtggcacacgggttggtctattaaatgccaaccgcgaaggaataatctctaccctggggtatgtggcaatacacatggctggtgtgcaaacagggttatatatgcataagaaccgatcacatatcaaagacttgataaaagtagcctgttttcttttactggcagctattagcctcttcatatctctttacgtagttcaagtaaatgtagaagcagtatctcgaagaatggcaaatttagccttttgtatttggatagttgcttctagcctgatccttcttagtagtttattactgggtgatataattttgagttttgccaaatttctaattaaaggagctctagtaccatgttcttggaaacttatccagtcacctgttacaaataaaaagcattcagaatctctagtccctgaagccgaaagaatggaacccagtctttgtttaatcacagctctaaacagaaaacagttaatatttttcttgctgtcaaatataacaactggcctgatcaacctgatggtagatacattacacagcagtaccttgtgggccttatttgtggtcaatctctatatgttttccaactgtttaattgtatatgtactatatttgcaagataagactgtacaattttggtgatcagcaggagtaggatatataagtatttgggcaatatttaatgaggaatattaattgtaaagaaattgtgcttttggcaacagtgttaaccatattttattataaaatagtttcagtcatctaaacagcagtgatgcttaattatttttttttttgagacagagtcttgctctgttacccaggctggagtgtagtggtgccatctcagctcactgcaacctccacctcccgggttcaagcaattctcctgcctcagcctcctgagtagctggcactgtaggcatgtaccaccatgcccagctaatttttatatttttagtagagatggggttttgccatattggccaggctggtctcaaactcctgaactcaagtgataacacccaccttggcctcccaaagtgctgggattacaggtgtgagccaccacactgggccaatgcttaatattttaatgtatctcaacaataaaaccaagaagaaacaaagccttttgacttgttagaatgtattaagtagtattttaaagaaactttatagttgtgacattgaaagactgttggggtggggggaggaaaatttttactttccatcttaatgtaaccttatgctattctgtatttttactgtatattgcttttacaataaatataaaatgaaatgtttatgttgacatttcagtgtg

SEQ ID NO: 6733 - DNA, 2970 bp, Homo Sapiens
  NM_178519
acgtctgcggtgttacccacgactgcctgggacctggccaagggctccacacaccaagaccaaggcagcaggaaggagaaaggagggaaggtaaaagactactgaaaagctttcagctggggctgggcatggaggctcacacctgtaatcccaacactttgggaagccgaggctggtggatcacttgagcccaggagtctgagaccagcctggccaacatggcaaaaccctgtcgctacaaaaaatacaagaattagccatgtgcacctgtggtcccagctcccagggccgggagcctgaaaccaaggtgtccacagggccctgctgcccccagaggctctgggcagagcccttccgcctttccagctccccctggttcccgtgctcctcggcctgtggccccatcactctggcctctgccttcatctcatgccgagatccctgaagcgggcccagctccgttcactgctcccccggcctcctgctgtttcccacacgcagccatggtacagggcagctcatcccaccacctccccaaccgcagcctccagggatgtacaccctgcctcaggggctgtgcctgggccctggctggtggagggcacagccgtcagggaaggccctcagctgcaggatgccgtgcctcagagaccaaccaggccctcgaaggcactgtggccggcccagatgtcagcagctccagcaattaggctgggacagatggtgcctggtgacacaaggggactgtgggggccacaggggaccctgctcacctggacctaccgtggaggccagggagggagatggactcgaagggcggaagggcccagagaaggcacatttgcagagcagcggccgcatttccagagctcgggagcccaacaggaatcccgtctggccatgggaccaccgcccttggggctgggggatgccgcaggggacggcagagggcagacaggccaggaaaaggggagggcagagggcagacaggccaggaagagcgcctgcaagtgcccaaggaagggaccaaacccaggcccctggaccagagcggccgcctggtggggcaggctggaaggggccaaggccagcgccaagggggagcaggtgagggaccctggtgggcatctgtgggaacaaggccacgtttctccctgcgcacgctttaatcaaggacattcctgtggttctccaaaagtgtcgcacactacatgggtgtcgtgagctgggctccgtgagagtgtgcgggtggctgggggcagcaagggagcagcaaggcctcaaacccgggcggcggcctggcctgcgcgccaggatgtgcggtgtgagtttcccgagctgcaggaacaaggcccacagactggggagcttcacacaacagaaactgcctcgcagttcccgaggccagagcccatcggggtggctccctgaggccgtgagcccggactgtcctgggccgccccctcttccacaggctgagatcatccttggcgtctgttggcctgcggccgcctcgcccaacctctgccctcatgtccacacgggtcctccctgtgtgcatgttggtgtctggatctgccctttctactgtggggcaactgtcgtcgaggatagggcccaccacacaacacggcctcatcgtaactaagtatagtcagcagtgatcctatttcccaataaggtcccattctgaggtcctggacttcaacatgtgaattttgggggccacaactctaccctggcatgcagagagagaaggggggcgtggagtccccctggggggaagtcccttgggaagtcacaggcccccttggtggggcaattgggacgtgggtgtgagggtcctgggtacagggagcctgcctaccaaggctctgccgacagctatttctaaattcctcgtggaaaataccctgtggccctcctcatctggagcgagcgacgggctggagggtgtctgagccaggctggtgccggggagcagatgtgggtggcccaacccagccccttgttcttgttccccacctcccaggaaagggggagggtgggcggagccggccctcctgggctctctccttgggtcccggagccacctggggaggggaggctcaaccccctaccttggccagctggctgcaggtctctcagggctggcacagaacagctgggctttgccaggtgtcccccatcctgatgcacggcccggtggtgcggtctccaggcctcccaggattctcagctgcgccgtctccccagtccccaaaccccagtggtggccgccaggggactggaccgtcagtctgtggagctggggctgcagctggtggtgtttccaacaagggtcttttggctgcctggccccagggagaggcctctggaggcaaggggtaacctaccgggaaagcctcaaaggcacccccatccccgccccgcacagactccaccggccccccatggttcctccaggccctcttcagtcatgacaggcagtgcctgggtgcccggcctgctcagtacaccctgggcctcagccccacccaagccttggcctagcatgggagccaccacgggaacacacacacgggctggagggtgtctgagccaggctggtgccggggagcagatgcgtcagatggaggagaaaagccctggggcagcggcttctggagctctggccaaggatgggctctgagcacacccctgcccggcccagagcaccaggccggggcagggtcaggaacagcttgaagccccctgcaaagtctgtccctcctcctggagcctcagctgcccctccaacacagccctctgtgggagcctagatggcccccgtgtggccatgagacatgggcgggcgctggtggattcctctgtgtcaggtgacatggtggcaccccggccgcaggctgtgccccggctgtggcgttaagaagggctatggatctaaataaaatccagtctctttgctgg

SEQ ID NO: 6734 - DNA, 3070 bp, Homo Sapiens
  NM_178523
actcccggaagcagattgcgccagggaaaggccttatcgctgtgtgtgtgtttcagtctacgtggattaaacattacttcgctccgtctgcctggattaaacgtgcactttgcagtcctcacttctccgtaccagtgatctggggatcgctacggaccttaaaatacccatagccccttcgcccctgcaacaggcacttctccccacgtttgatgtgtgaataattacattgactgagaaagaaacccagaagaggaagaagaggaaggaaaaggagtcagtgatggctactcaggggcatttgacattcaaggatgtagccatagaattctctcaggaggagtggaaatgcctggagcctgtgcagaaagctttgtacaaggatgtgatgttggagaactataggaacctggtcttcctaggtatctctcctaaatgtgtgatcaaggaattaccaccaacagagaacagtaatacaggagaaaggttccaaacagtggcactggaaagacatcaaagctatgatattgaaaatttatacttcagggaaatacagaaacatctacatgaccttgaatttcaatggaaagatggtgaaacaaatgataaagaagtgccagtgccccatgaaaacaatcttactggtaaaagagatcaacatagtcaaggggatgtagaaaacaatcatattgaaaaccagcttacatcaaactttgagtcacgtctggctgaactgcagaaagttcaaactgaagggagactttatgaatgtaatgaaacggagaagacaggtaataatggttgtttagtttctccacacattagggaaaaaacgtatgtatgtaatgaatgtggcaaagcctttaaagcgtcttccagccttattaatcatcagaggatacatactacagagaaaccttacaaatgcaatgagtgtggcaaagcctttcatcgggcctcactactaactgtacacaaggtagtccatacaagagggaaatcatatcaatgtgatgtatgtggcaagatcttcagaaaaaattcatattttgtaagacaccaaaggagtcacactggacagaaaccctacatatgtaatgaatgtggcaagtcctttagtaaaagttcccaccttgcagttcatcagagaattcataccggtgaaaaaccttacaaatgtaatctgtgtgggaaatcctttagtcagcgtgtccatcttagacttcatcagacagttcatactggagagagacccttcaaatgtaatgagtgtggcaaaacctttaaacggagctcaaacctcactgtacatcaggtaatccatgcaggaaagaaaccatataaatgtgatgtatgtggcaaggcattcagacatagatcaaatcttgtatgtcaccggagaatccacagtggagagaaacaatacaaatgcaatgaatgtggcaaggtcttcagtaaacgttcaagtcttgcagtgcatcgacgaattcacactgtagagaaaccttgcaaatgcaatgaatgtggcaaggtcttcagtaaacgttcaagtcttgcagtgcatcagagaattcatactggacagaaaacttacaaatgcaataaatgtggcaaggtgtacagtaagcattcacatcttgcagtgcattggagaattcataccggcgagaaagcttataaatgcaatgaatgtggcaaagttttcagcatacattcacgacttgcagctcatcagagaattcatactggagagaaaccttacaaatgcaatgaatgtggcaaggtcttcagtcaacattcacgtcttgcagtgcatcggagaattcatactggagagaaaccttacaaatgcaaagaatgtggcaaggtcttcagtgaccgttcagcttttgcaaggcatcggagaattcatactggagagaagccttacaaatgcaaagaatgtggcaaggtcttcagtcaatgttcacgtcttacagtgcatcggagaattcatagtggagagaaaccttacaaatgcaatgaatgcggcaaggtctacagtcagtattcacatcttgtagggcatcgaagagttcatactggagagaaaccatacaaatgtcatgaatgtggcaaagcctttaatcagggctccacactcaatagacatcagagaattcataccggagagaaaccttacaaatgcaatcagtgtgggaattcctttagtcagcgtgtccatcttagacttcatcagactgttcatactggagacagaccttacaaatgtaatgagtgtggcaaaacctttaaacggagctcaaacctcactgcacatcagataattcatgcaggaaagaaaccatataaatgtgatgaatgtggcaaggtattcaggcatagttcacatcttgtaagtcaccagagaatccacactggagagaaaagatacaaatgtattgaatgtggcaaagcctttgggcggttgttttccctcagcaaacaccaaagaattcattctggcaaaaaaccttataaatgtaatgagtgtgggaaatcttttatttgtcgctcaggcctcactaaacatcgaataagacatactggagagagccttacaactaaactcaatgtgacaaggccttagacgttgtcctagtttctggaatcaccgaataattcctacttactgatataccttgtatatttaccccttctcttgaaatccctgtggaattgtaatctccagtattggaggtggggcccattgggaggtgattgaatcatggaagtggatttctcaaactgagaaagatgtagcgtcatccccttggtgctgtcctggcaatagtgacttctcttgaggtctggctgtttagaagtgcatagcacttccctgtcgcttgccctcattctcaccatgtgaaataccgacacccgctttgccttccaccatgattttaaccttcctgaggcttccctagagggtgatcagatgccagcaccatgttttcatttaagccttcagaaatatgagccaattaaactcttttctttatacattaaaaaaaaaaaaaaaaaaaaaaaa

SEQ ID NO: 6735 - DNA, 3132 bp, Homo Sapiens
  NM_178526
gaggcggggccgtggcggctggaggtagcggcggcggcgacgcgtccgggccggtgagggggcgcggggggcgccgggggggcccaagcgtcagcggcccgcgcctgtcgggctgaactgaggaccgagtctcctgccattccgagcaggcctggtatgggtaatggtgtgaaggaaggcccggtgcgattgcatgaggatgctgaggctgtcctgtcctcgtccgtctcatcaaagcgtgaccacaggcaagtgctcagctccctgctgtctggggccctggctggtgcccttgccaaaacagcggtagctcccctggaccgaaccaaaatcatcttccaagtgtcttcaaaaagattttctgccaaggaggccttccgggtcctctactacacctacctcaacgagggatttctcagcttgtggcgcgggaactcggccaccatggtgcgcgtggtgccctacgccgccatccagttcagcgcacacgaggagtacaagcgcatcctgggcagctactatggcttccgtggagaagccctgcccccttggcctcgcctcttcgccggcgcactggctggaacgacagccgcttcactgacctaccccctggacctggtcagagcgcggatggccgtaaccccgaaggaaatgtacagcaacatctttcatgtcttcatccgcatctcgagagaagaggggctgaagactctctaccatggatttatgcccaccgtgctgggggtcattccctacgctggcctgagcttcttcacctatgagacgctcaagagcttgcacagagagtacagcggccgccggcagccctaccccttcgagcgcatgatcttcggcgcctgcgctggcctcatcgggcagtcggcctcgtacccgctggatgtggtgcggcggcgcatgcagacggccggcgtcacgggctacccgcgcgcctccatcgcccgcacgctgcgcaccatcgtgcgggaggagggcgccgtgcgcggcctctacaaaggcttgagcatgaactgggtcaagggtcccatcgccgtgggcatcagcttcaccaccttcgacctcatgcagatcctgctgcggcacctgcagagctaggggaccctgagctgctctcaggacggtggaccggtgacccctttgtattctgggcccatggaacggtgggggggtgcgcttgattctacttcaggaggcacatggggcgctttatggaacgagcaggtgggcctgaggggcctgggctcagagtccacgtccaaacgcaaagctggcagccctggaagtgcagtgttggggcgatggtgtggggggtcccgcagctcccctcttccttcctctgcagacgctggcgctgtctgccggaggtgttgcccaaaaggccctagtggggcgtggtcagctccacctcctgatcctgtgtgtcctccgacatgctgctgattctagtgacccctgtccccaccaggctcagagccagaccgcgcctggaccttcttgttctgactccacgtgcctgcccggcctccagggtgcgggggcgcctttcttgcaggcggaccctgcccaggatggggccagcctcgtgctcagctttggccacaaatgcagcccctggcccaccccaccctgccggccctgccttctccagtatttcccacatggccacgactcctcagtcactagagcctcctgctgggaacagtgtcccccagagcctcatgtctatcctagaccctgcaagcagctgggtccccaagagtgcatctccccctagagttgcctgcccatgcccacctgctttgtaaccttcccaggagattcatgcttgctctgcacagcagggctcgaggcccaggccatgacacggaactgcctcaggtttgggtcagacctgcatcctggggcatctgctgaaatgtgagcacacaaaccacctcctttggcccagaagccccccaggcctagcatctcagtgccccaaccctctgcccagctgtggtatccagcaggtccttgggtccccacttgagcaggcacttggctgggatatggagcaatttaaagcccacaggggttgttcagtttctatgaaatggagcatggggtgcctgctagcctcaatcccccgaagtgggagcctcatgatagagtatagcttgggggtgggaggtgaggaaaatctgaggtacccaggggaacccccagctaactggtctctcagaggagtcccccagggcccgccagctatcacagggactcagaaacacccatttcctaatgacatggtgagtttcttgatttcttttttttgtttgttttgttttggttttcaacttggctgaccccgggtctatgatctattcacatcgaacccctgactggtctgcctggtgccagggtgagcgtgaccgtgagtgttgctttcgacagctggctcagcacacgctgtgtgaagggatctgagcttgttcatctccagtcgtgacttcatttcccttccttctgtcctcctcctgttcttgccttggacctgcaggtgtgcagaccgctctctctgccttccttgcatgtggccaccagccatccctgatcttgtccccagaggcccaggcagcctgtgatggctgtgaggggctgtcccactgtgtgggtatcccttacccagcacttaaacttggcaggagaggcagggcaaccctcacagggagatgggagggcacccaactcccacaagcatgcaacagcagtaggaattgggggtctgccccaggtgggtgagaccaaatgagtggatttggggccacaggctaggcaggagagacaaggggtaggtgggagggtcccccagtccctgctgaccccagtgtgtctccccggagatggctcctagctgagtgggacccggcaggagttggggacagtgctgtcccccacccctgcacacagccaggccctcaggctctgcggtcactcgcctccctgctggtcactggtcttggtctggagttatattttgatgccatgaagacactgtttatatctaatgtttatatattttaaagatttgtgccaagagagtatatttaataaaaacttaaatgacttcttctcctg

SEQ ID NO: 6736 - DNA, 2252 bp, Homo Sapiens
  NM_178542
gcttcgcgactgcggaaggttgcccgggctggcgccgctgggcagagccggtgcgacgtttccctttccagctttgttcttccggccctgctgtctgcctccccggctgattggattcgttactgctttgcaacgcgcacctaactccagacggggtctcactctgtcgcccaggctggagtgcagtggcacaatctcagcttgctgtgacctcagctctctgcgacctctgcttgctggactcaagcgatcctcccaccacctcagcctcctgagtagctggaaccatcatatgcaccagcacgcctggctaagctggaatgcaatagcgtggtcttggctcactgcaacctccgcctcccgggttcaagcaattctcctgcctcagcctcctaagtagctgggactacaggggccctcctgctgctccctccatgaggctggtcctgaaggaataggcctgtggctcgtccctcctccccatctcggccctgaggcaaacataccttccacagctctgggagcaccgcctccacccaggtctcacaggatgggacacaaggataggcattaagcaggacttccagggcccgagggaagttggcgcagtgtttcagcatctaggggtcaaaagagggtcttgggcacatgcctcccccacccgagggcagacccaagtcttgcctcacccacatggccaatcctagcctaatctggggggctaaggtctgagtctctcttcccttttttgtgcctctgtctaccccaccctcaagtatgctccaaccttttggccccagttttcctctggggctcttccctcccttggactctctctcccagaatcctctctccccctcccaagctggggacagccccctggccactgagggcaggctttcagtctcttggaccctctgtcttccccagaagcggagcagttccagccgcgggctcccccacacaggagcctcctatgtcagggcctcccagcgcacctcagggcgcactggctgcgccccgtagtccagcagtgcggcgaaaaggacttcaggctcccagttgggggagtcctggacggcctgcagcgcacagtccatgggcgtgtggcccgccccattggggacctcagcgcgggccccgtaacgcagcagcagctcggccaggcccccgcagccgttggcacaagcgttgtgcagcggcgtgtggcgcttgcgcccggccgcccgggcatcagctccagcctccaggagccggcgcgccgcagcctggtgtcgcctgcagctacctgggccctcggccccagcgcacgccgtgttcagcgcagtctcgccctggctggtgcgcaggcccacgtcggcgccatgctccaggtacagagccacatgttgctccaggccgcgcgccgccgccacgtgcaggggcgtctcctggctctcgcctgctgccaggttcaccgtcgctcctgcttccagcagcaacttggcgcacctggggacaagagagcaaggtcctgaggaaaatcctgaaggcttgggaccccttcagcttgctgtgacactcccttgcctttccacccctctcagcttgaggtcctacctggtgtcctccatgagaatcatacaagccccgctacagacaacagaattggaaggtcctgagagctaccagaagcatcttcagttttcatatgaaaaacttaagcccaggagtgatttgtgcagccaaggacacacagcaagttagtggctgcaccagaaatagtactcactgcctcagacagtccctcccacagtctactctgtctccaccccaaggtctggttctgaatcattcagttgtcagttgtctccttttttttttttttttttggagacagggtctctctctgtggcccaggctgaagtgcagtggtgtgattacagctcatgtagcctggacctcccaagctcaagcaatcctcctgcctctgcctcccaagtagctgggaccacaggtgggcagcaccacacctggctaattttttaaatttttttttatagagacagggtcttaccatttgccccagctggtctcaaacccctgggctcaagcaagcctcctgccttggcctcccaaagtgctgggattacaggtgtgagccaccacacccggccttatctcctaacattttgatagcacaaaattttgaaaacccacttctgtgtacgttatgaagcatagaaaattaaacagtatgcaccaaaaaaaaa

SEQ ID NO: 6737 - DNA, 3723 bp, Homo Sapiens
  NM_178564
aattcccagagccggggctggggctctaggctgccgcggcggctctaggctgggctgctgggcgcgaggccagggcgggccgggagaggctgcgccggcggcggatcgcgcagagggcggtggcctgggctggccgaaccatggcggccccggagccggcgccgaggcgggcccgggaacgggagcgggagcgggaggacgagagcgaggacgagagcgacatcctggaggaaagcccgtgtggtcgctggcaaaagcgacgggagcaggtaaaccaagggaacatgccagggcttcagagcaccttcctagccatggacacggaggagggggtagaggtggtgtggaacgagctccacttcggagacaggaaggccttcgcggcgcacgaggagaagatccagaccgtgttcgagcagctggtgctggtggaccacccgaacatcgtgaagttgcacaagtactggctggatacctctgaggcctgcgcgagggtcatcttcatcacagagtacgtgtcatcaggcagcctcaagcaattcctcaaaaagaccaagaagaaccacaaggccatgaacgcccgggcctggaagcgctggtgcacgcagatcctgtctgcgctcagcttcctgcacgcctgcagccccccaatcatccacgggaacctgaccagcgacaccatcttcattcagcacaacggcctcatcaagatcggctccgtgtggcaccgaatcttctccaatgcacttccagatgatctccgaagccccatccgcgctgagcgagaggaacttcggaacctgcacttcttccccccagagtatggagaggtggccgatgggaccgctgtggacatcttctcctttgggatgtgtgcgctggagatggctgtactggaaatccagaccaatggggacacccgggtcacagaggaggccattgctcgcgccaggcactcgctgagtgaccccaacatgcgggagttcatcctttgctgcctggcccgggaccctgcccgccggccctctgcccacagcctcctcttccaccgcgtgctcttcgaggtgcactcgctgaagctcctggcagcccactgcttcatccagcaccagtacctcatgcctgagaatgtggtggaggagaagaccaaggccatggacctgcacgcggtcttggcggagcttccccggccccgcaggcccccgctgcagtggcggtactcggaagtctccttcatggagctggacaaattcctggaggatgtcaggaatggaatctacccactgatgaactttgcagccactcgacccctggggctgccccgtgtgctggccccacccccggaggaggtccaaaaggccaagaccccgacgccagagccctttgactctgagaccagaaaggtcatccagatgcagtgcaacctggagagaagcgaggacaaggcgcgctggcatctcactctgcttctggtgctggaagaccggctgcaccggcagctgacctacgacctgctcccaacggacagcgcccaggacctcgcctcggagctcgtgcactatggcttcctccacgaggacgaccggatgaagctggccgccttcctggagagcaccttcctcaagtaccgtgggacccaggcctgacccggagccccagccccaggggaccatgccggggtgctgcctgggcaggccatgttggggagactccagcaccgtggggctgccctcctccatgcgcctgggagcacaaaggccccggtagtgaaggaaccccccgtctcctgagagtggggctgaccctgccttgggcgccgaggggttggggggtgggtgtgggggagccgttaggcctcccaggtccttaggatcagggttgcccccagaaccccttcccatatcctccattctccgccctgagttcctacccaggctgcctggccggggccactgcctcctcagcatgcaggaggctgccctgtagggaaccccagctctggggcttgggggtgagggtcagccctggacagacctctgcccagggaactgctccatggggtctgggagagcagccatcccctgctggcaccatagacccacacaaggagcctgcacagcaagccagcggtgacacacctgcaggtgtcaggcatggcactgggcacaacagggacctggcaggagaaacagaccacagagaggtctggagttgaggctgttgtcagcaaagcccctggtcccacacagctctgccctagagccacctctttgaccctttacccaccctgagaccagaacttgcagcccctctgcagatctcctctggccactgcagcccctccaatgggctttttctctcatgcattccctggcctggaggcgtcagggaccccacatcctccctgctcctcagactcacagcccctccatgttacctcccgcacctcctccctggggcagctgctccctgggcctctgaggatgtcagctcctggctccctgcctctctcccactccactcctggctcagtcttagagatttctatgccctcatggattctacccctgccttcctggcctcttgattcttggcttgcctctcctccaattccaaacttagtgaaatggccttaagcattttaaactgtatgtatacattagcgcattcatgcctttctaaacgcatttcaaatgtcaaccaggaaggcacaccactgtattagttttatactgccgctgtaaaatttaccacaaacttagtgacttaacacaaatttattgcaattctgtaggctggaagtctgactatgggtctcactggactagaatcaaggctggcaggctgccttccttcctggaggttctaggggagactctgtctcctgctccttcaggctgctggcagaatccacatcctttcggtggcagggccaaggtccccactttcttgctgactgtaaactaaggccacttccagcttgtagaggctgcctacattccttggctcttggccccctcctccatcttcagagctagcaggttcagtctgtgtcacgaaccatttctctggttccctgcagacaggaaaggttgtccctaaggactcatgagattaggttgggcccagccagataatacatgataatctccctcctcaaggtttttaatattaaacacatctgcaggacacattttgccatgtaaactaacattcactggttccagggattaaggaatgaacctcttttgttggggaagggtggcattctgctgaccacagcactccaaccaaaagccaaaaaccaaagcaagacttactaacgcatatcaaataaattaaaggtacaaaatcgtgaatctcagttatcttaaatattccaatactatttacaaaattattcaaattctcacgccttccaactcaaaattagcaatctaaagtaatttccatatcctagatggaaaccctcatgctaaactgtctgattatgcatggttctaaatggtttcagtggcaaatacataacattgtactactgattaaactgaacttaaaagcatcaataccaccattgctgcacttaatcatgtctctgttgaatttttccttttaaattttatcttttcagaattatatatgtattgtttttaaagtagaatagttttttttttgaggccaataataaataataaatgcaggctcctactctgatcctctcca

SEQ ID NO: 6738 - DNA, 2011 bp, Homo Sapiens
  NM_178582
cgtcacttcctgttgccttaggggaacgtggctttccctgcagagccggtgtctccgcctgcgtccctgctgcagcaaccggagctggagtcggatcccgaacgcaccctcgccatggactcggccctcagcgatccgcataacggcagtgccgaggcaggcggccccaccaacagcactacgcggccgccttccacgcccgagggcatcgcgctggcctacggcagcctcctgctcatggcgctgctgcccatcttcttcggcgccctgcgctccgtacgctgcgcccgcggcaagaatgcttcagacatgcctgaaacaatcaccagccgggatgccgcccgcttccccatcatcgccagctgcacactcttggggctctacctctttttcaaaatattctcccaggagtacatcaacctcctgctgtccatgtatttcttcgtgctgggaatcctggccctgtcccacaccatcaggtcagaaggcatctctctgcaacatttgaagcagctttctcgggaaccagtacagggtcttggatgagaacatgacttttggcatcattcagagccaggtttgaatcctggctataaaactcaagggactctttcccctgcacactgtagatgactaggacaagaacaatgacctctctgggccacagtttccttatagacatgatgaggatctggtgggtgtttccaccaccacagctgttgggaaagtgatttgtgagcagtaatgtcatgttagttgtgacagtactcaggtgagtaacaccagtaccacctgccgggtgttgtggcctagctgtgtgctaagtgccatgttgggctcctcacacatgatcgtgtttcgtaaggagccagaggcagcatagtgaaaagttaggagcgtgggctctggcatttgactaccttactttgagtccagactctgccacttaatagctctgtgatcttgggcaagttacttaatctctctggcctcaatttcctggtgaatgtggagaaaaataatagtgcccttcccatggggtcatgtggaaagcttttagcacagtatctggtgatttaaagtgttcagtaactattagctgttactgtcattatctgtgttaacctgccagacaaccttatatgggttgcttttgctttcacacctgtatgatagtcatggaaactgaagcccagagaggttaagaaatttgctaggatcacaccactaataagcaacagagccaggattcaaacccaggtgtggctccagagcccatcctcttcccactgctaccctaactcaaactgccacatgctcgtgtcctttcagtggggagagtggttcattagagggggttgctacttttattttggacaggccagttctccattctgcaggactatcccatgtattacaaacagttggcaaccttgccctgctcaccaaatgggagttgcataccagtattccccagcttgtgactacagagatgtcccagtatgtttctttctgccccgttgaagaggtgcagcctcaggctgagaaacactgatagaccaagaggtggccagggttcccagaaggaaggaactcaccttgaacttagctttctttgaagggtaggaaacctggaagacgtacaaaggagggagaggtcaggtgctagaaagtttgtgcacattgagggcatgggcagaatctgctcccaaaagcattgaaagccaatatgaggccaggtggtggctcatgcctgtaatcccagcactttgggaggccaaggcaggcggatcacaaggtcaggagattgagaccatcctggccaacatggtgaaaccccgtctctactaaaaatacaaaaaaattagctgggcatggtggtgcatgcctgtagtcccagctactcaggaggctgaggtaggagaatcattgaacctgggaggcggaggttgcagtgagccgagattgcaccactgcattccagcctggcgacagagtgagactccatctc

SEQ ID NO: 6739 - DNA, 3531 bp, Homo Sapiens
  NM_178583
ctggagcccagatttcaagttttgagtaaaataccttcaagcgaatgggccctattgtgctcacacattcagaacctgttacccaaggaattccctaaagaattagaagtgcgtctcaccaaccagccaagatgaacatggtgaagaggatcatggggcggccgaggcaggaggagtgcagcccacaagacaacgccttaggactgatgcacctccgccggctcttcacggagttgtgccatcctccccggcacatgactcagaaggaacaagaagagaaactgtatatgatgctgccagtgtttaacagggtttttggaaatgctccgccgaatacaatgacagaaaaattttctgatcttctgcagttcacaacacaagtctcacgactaatggtgacagaaattcgaaggagagcatcaaacaaatccacagaggctgcaagtcgggccatagttcagttcctagagattaatcagagtgaagaagccagtagaggctggatgcttctaacgacaattaatttgttagcttcctctggtcagaaaaccgtggactgcatgacaacaatgtcagtgccttccaccctggttaaatgtttatatctgttttttgaccttccacatgtgcctgaggcagttggaggtgcacagaatgagctacctctagcagaacgtcgaggactactccagaaagtttttgtacagatcttagtgaaactgtgcagttttgtttcccctgcggaggagctggctcagaaagatgatctccagcttctattcagtgcaataacctcttggtgccctccctataacctgccttggagaaagagtgctggagaagtcctcatgaccatatctcgtcatggtcttagtgtcaatgtagtgaagtatattcatgagaaagagtgtttatctacatgtgttcagaatatgcagcaatcagatgacctgtctcccctagaaattgtcgaaatgtttgctgggctttcttgtttcctcaaagattccagcgatgtttcccaaacacttctggatgattttcggatatggcaaggatataattttctttgtgatctcttgcttagattggaacaagcaaaagaggcagaatccaaagatgccttgaaagatctggttaatctgataacttccctaacaacatatggtgtcagtgaactaaaaccagctggtattaccacaggggcaccctttttattgcctggatttgcagtacctcagcctgcaggcaaaggtcacagtgtgagaaacgtccaggcctttgcagttcttcagaatgcatttttaaaagcaaaaaccagcttccttgcccaaatcatccttgatgctatcacaaatatttacatggctgacaatgccaattacttcatcctagagtcacagcacacattgtcacagtttgcagagaagatttctaaactcccagaagtacaaaacaaatactttgagatgctggagtttgttgtttttagcttaaattatataccttgtaaagaacttattagtgtcagtatcctcttaaaatctagctcttcttatcactgtagcattattgcaatgaaaacacttcttaagtttacaagacatgactacatatttaaagacgtgttcagggaggttggccttttggaggtcatggtaaaccttttgcataaatatgctgccctgttgaaggatccaactcaggcactaaatgaacaaggggactcaagaaataatagttcagttgaagaccaaaaacacctggctttattggttatggagaccttgacagtgcttcttcaaggatcaaacacaaatgcaggaatttttcgagaatttggaggtgcaagatgtgcacataatatagtaaagtaccctcaatgccggcagcatgccttgatgactatccaacagctggtgctctccccaaatggggacgatgacatgggcactctcctggggctaatgcattcagccccaccgacggaattgcagttgaagactgatattttaagggccctcctgtcggtccttcgagaaagccatcgttcaagaacagtttttaggaaagttggaggatttgtgtacattacatccttgctcgttgctatggaaagatctttgagctgtccacccaagaatggctgggagaaagtgaaccagaatcaagtgtttgaacttcttcacactgtgttctgcacgttgactgcagcaatgcgctatgagccagccaactctcatttcttcaaaacagagattcagtatgagaagttggcagatgctgttcgatttcttggctgcttctcagacctaagaaaaataagcgccatgaatgtcttcccctcaaatacacagccatttcaaagacttttagaggaagatgtaatctcaatagaatcagtgtcacccacgttacggcactgcagtaaactttttatttatctttacaaagtagccacagattcttttgacaggtatggctctgctctgtcctctgaattaaagggtgtatactaagcatgacttcaacattaagacttgaattatgagttaatccaaaagaatatgaaaacagatgactcttctcctatttgtttgaagtgtatcactttatttttgaatattactcttgctctggtattgtttttttttttttttagcatggaagcctgtgtactatttgtaaattcaggttcaattagttctcattgcagttattggaacagtttctatgaagtttcctttaatgatagtgtttactgttgttttttttctttttagcctcaaaaggtgcatctggacttattgatatgtgttatcaatagaacatcattatgattattcttatttccagacacgtactccatcattctccacatatcatactcctcaaaaaatgatatagttcccaaagagaggtgtcagtgtcttgaaccgtcaagttcaagaggccatcagactcaatatttactcattccttcatgaaataagtacttaacaaaaagctgctgcatgccaagtcactgtgctaggcattgaggattcagctctacacagggctgtcttggtccttgctatcttttagctaaaatgtagacacataaataaacaattacatatagtgtgacacattctacagtgggggaatccagggttctcaggcagattgtaggagagccacttcatctagatcacttattttcagtgcttcaactgtgttttcaatgaagatgtcactttgaaaataatacttctaatttatgccccaagtgttattgcttttaacttaccatagttttactacataaaataaatgaactgccctcatcaatagaccatgtaactacattggatagagcttgtaataggttttgtgtccttttctgtggaatatctgctttgaagtatcaactgagatatttcctgcttcttaacaagatttcttagtcctcagtatttacatttaaaaatccaaacagctttgacaacaattgtaaaaaaaaaaatcattaaacttctgcttttccct

SEQ ID NO: 6740 - DNA, 1460 bp, Homo Sapiens
  NM_178588
agttccctccagctgcagagagcttcagtttgtctttttttttttaaactaaaatggaggctggtttcttgccttaaggagcccattgcctttcccgctgaagtctagatgttgacatgtaataaagcgggcagcaggatggtggtggatgcggccaactccaatgggcctttccagcccgtggtccttctccatattcgagatgttcctcctgctgatcaagagaagctttttatccagaagttacgtcagtgttgcgtcctctttgactttgtttctgatccactaagtgacctaaagtggaaggaagtaaaacgagctgctttaagtgaaatggtagaatatatcacccataatcggaatgtgatcacagagcctatttacccagaagtagtccatatgtttgcagttaacatgtttcgaacattaccaccttcctccaatcctacgggagcggaatttgacccggaggaagatgaaccaacgttagaagcagcctggcctcatctacagcttgtttatgaatttttcttaagatttttagagtctccagatttccaacctaatatagcgaagaaatatattgatcagaagtttgtattgcagcttttagagctctttgacagtgaagatcctcgggagagagattttcttaaaaccacccttcacagaatctatgggaaattcctaggcttgagagcttacatcagaaaacagataaataatatattttataggtttatttatgaaacagagcatcataatggcatagcagagttactggaaatattgggaagtataattaatggatttgccttaccactaaaagaagagcacaagattttcttattgaaggtgttactacctttgcacaaagtgaaatctctgagtgtctaccatccccagctggcatactgtgtagtgcagtttttagaaaaggacagcaccctcacggaaccagtggtgatggcacttctcaaatactggccaaagactcacagtccaaaagaagtaatgttcttaaacgaattagaagagattttagatgtcattgaaccatcagaatttgtgaagatcatggaacccctcttccggcagttggccaaatgtgtctccagcccacacttccaggtggcagagcgagctctctattactggaataatgaatacatcatgagtttaatcagtgacaacgcagcgaagattctgcccatcatgtttccttccttgtaccgcaactcaaagacccattggaacaagtaagaaagaactggctgccatctttttcagtcattttaaaatatggcacgttttactgctacttcagtaagaataaatatcagaattttaaatatcaattaaaaaacaagaaggtcaaaaaaaaaaaaaaaaaaaaaaaaaaaaaaaaaaaaaaaaaaaaaaaaaaaaaaaaaaaaaaaaaaaaaaaaaaaaaaaaaaaa

SEQ ID NO: 6741 - DNA, 3589 bp, Homo Sapiens
  NM_178815
aggtaggtgggtacagaccgaggggactacgggtcggcgttgggctcagtgggctcgaaacaaagggctgtccggtggggattcgtcgcggcgccttctgagtggtcgggtcgaggcttctcggcctagcagtgccctcgctgcgcgatctcaggcgggttctcctcggctccgcgcagcccgcgccgcggtgggggacccggcgcagcggcacctgctgccgagggaccccgcggcccgccccggtgctcgtgatggggctgatcttcgccaaactgtggagcctcttctgtaaccaagaacacaaagtaattatagtgggactggataatgcagggaaaaccaccattctttaccaattcttaatgaatgaagtggttcatacttctccaaccataggaagcaatgttgaagaaatagttgtgaagaacactcattttcttatgtgggatattggtggtcaggagtctctgcgatcatcctggaacacatattactcaaatacagagttcatcattcttgttgttgatagcattgacagggaacgactagctattacaaaagaagaattatacagaatgttggctcatgaggatttacggaaggctgcagtccttatctttgcaaataaacaggatatgaaagggtgtatgacagcagctgaaatctcgaaatacctcacccttagttcaattaaggatcatccatggcacattcaatcctgctgtgctctcacaggagaagggttatgccaaggtctagagtggatgacctcccggattggtgtgagataacttttttgcttgaaagagactgctctatttattctgtgacatgaacattttttcctagtacctttggctgctaaggcagcagcatgtttaatttataacaacacaaacctctgagagcaacacttgaatcaagtgcagctgaactggaacataaaagattttttcttaactttttttttttaacacactaatcttcagttggatgaatgtaatgtataactatgttttcagcaacaattcttctgtttattctaattaatcagtgactgccttgtaagaaatgtttgtcatatgcgtgatgtcttctgaaatattcttataaccttaatgaccaattgctttcaattcttgaccagcactccctcccaaccagagaattactggtttgatagagtagtcttggaaaccatcaggtactgcctgcagacttctccagcactaaatatatttgttccctctataaaccattcatctttcggacagaacttactgtaaagaaagaaatctgcctagaggatatatgtaaggaagattccacatcatgagtacttgccttttaactttcccccacattactgttgagtcatggaataatgtttaagttgttatttgcatggaaattaagtaggctgtttatttatctaaaggaatcaagtccactcttctgcctgcaacatttgttcaaaaactaaccaaggtaaaatatttatttgaaagcccaactttgatgttaaatattcttgaataaatctgttattttaagaatatcacattattcaatgcatataaaactatcagaagttagtaaatcataccagcactaaaaataagacaattggaatatattttagcatcagtttacaaacaactttattatcaacagaaattttagctcttttctttgcaagatatatcacagctgctttgggcagtagctgaagccgaagtatgaacagtccattttgtttcttaaaatttgaagtcgtgtctgtcatagcatttttactaccagcagtatgttacttaaaaaactacatggctttccttgaatttatttgacggtattatgtaatagacttgaaacaattgccatctttgtagttatgccttgggttctaaaatgttataggaaactgctgaattgaatcctagcttttagaatattaataggagactcaaagttaatattcttaacaacttaaaattaaaaaaagtcataatctatcaaaagtttatttattggatggcattaaaacatttttgaggcagttgtctaatatgaacaataatctaaacaatatattccttaaattaagaggaaagacaagtgtcgtatttcgatcctgtttattcaaatgtgtgattttgctgaaatgaaagggataaaatgaatacttagagaataatacttcatttttgcagtactttttaattttgataaaaaagatacaaagttcataatatcaaaatatgtgttcaaaattggtattttaattttaatatttttgtaagttgatttaaattttgctcttttttcaggtgtgcttggtttattatatttagtcaagttaatttagtcgaatgtggtaacatttttctgatttatctttagttggagcacacccttgaactgaacagtggccaaaggaaagctttctgggctttggaaagtagttgtttaactttgttttaagccgttttcttagtgattctgtatcaagtagaggataagtgtagtttaacttagtttttaatataacccataatcaagaacatgagcgaaaagcagacataaatcgatatggatggtttgtggtgtgtgtgggatgtgggggaattaagaaaatgccatttacctaagcacagtttgcctgaatttctgcttggttgtgttgtttaccgtaagtactgagggtagtttccctaagtctgtcctgagaaaaagcatacttagtactcctgtatttgttcttatgaaatgactatctgccttcttgtatctagtaagattggctggctcaattttcttctgtcaaattatatggttattttttatattaccacatcagcattatattaaaagtgtttttaatagttgattgtattttgccaactactagtatagactcaaatttgctatttaatttttaaaatacaatttattttgtaaatcctttaaaaaatatttggttagttttggattagaaatgatttatgttagccatgtgttgaagatgaaattggcatcagtgtagacggtgctgattgggaaaagttcatgattaggaaattcatgtaagactttttaagagtattttttaggttttcactcaatctttcctgtcacagtaacgtgaaaactgattattctttactccaagagaatgttttaacccaagcaagtatctaatactagagcattggttctgacattcattgtaaatcagtgaactgtaagatactgtctaaaaaatgtacatttgtaattagtgcctttattcatattttgaaataagttcttagttttatattatacctgttctttagaagtcatgttagcagctaattatttcagtgatgaaataatttgtgttttatatcccccttcacctccatgtattggttagcacagtttatagtaagtgaaaagcaagggacccacctacattaccttcaggagactgttctaccttttaatttgaaaacaaggaaattaaattttaacagaaatcttttaagtatgttataaccaaagtgttcaattatccttgcaagttcaaatacagcatttttct

SEQ ID NO: 6742 - DNA, 4197 bp, Homo Sapiens
  NM_178835
atttgatctcacattaaccaaggaggagaatgtgagaaaagggggaaaatgcccaggaggaagcaggagcagcccaagcgccttccctcacatgttagtaggcaggaagaggcggagggagagctcagtgaaggagaacactggtatggaaactcttcagagactccgtcagaagcatcctatggggaagtccaggagaactataagttgtctctggaggaccggatccaggagcagtccacgtccccggacacctccttgggaagcacgactcccagcagccacacgttggagctggtggcactggacagtgaggtcctgcgagactcactgcagtgtcaagatcacctttccccgggagtgtcttctttgtgtgacgatgacccaggctccaacaagcccctgagcagcaatttgaggcggctgctggaggctggttccctcaaactcgatgctgcagccacggctaatggcagagtggagtcccccgtaaacgttggctcgaacctctccttttccccgccttcccaccacgcccagcagctcagtgttctggccaggaagttggccgagaagcaggaacagaatgaccaatacactccaagtaaccgttttatatggaatcaaggtaagtggttgccaaactcaaccaccacctgcagcttgtctccggattcagccatcctaaaactgaaagctgcagccaatgccgttctgcaggacaaatctctcaccaggactgaggagaccatgcgatttgagtccttttcctccccttttagctcccagtctgccagttctaccttggccgctttgtccaagaaggtcagtgaaagaagtttgactcctggtcaggagcaccctccaccggccagctccttcctttccctggcttctatgacctcctcagcggcccttctgaaggaggtggccgcaagggctgcgggcagtcttctggctgagaaatcatcgctgctgcctgaggaccctctaccgcccccgccttcagagaagaaaccagaaaaagtcactccgccacctccaccgccacctccaccacctccaccaccaccaccacaatccctggaattattattactcccagttcctaagggaagagtttctaaaccctccaattcagcctcagaagaggaaagtggaaagcctttccagtgtccaatatgtggtttggttattaaaaggaagagttactggaagcggcacatggtgattcacacaggtttaaaaagtcatcagtgtccgctctgtccattccggtgtgctcgcaaggacaatctcaaatcccacatgaaggttcatcagcaccaggatcggggagagacctttcagtgccagctgtgcccttttacttcctcacgccacttcagcctgaaactccacatgcgttgccatcagcacttcctgaggacagaagccaaggtgaaggaggagatcccagacccagatgtcaagggatctccccacctcagtgacagtgcctgcctggggcagcaaagggaaggaggagggacagagctagtggggaccatgatgacgtctaacactccagagaggactagccagggaggggctggcgtctcgcctttgctggtgaaggaggaacccaaggaagataacggcctgcccacctcctttactttgaatgctgccgacaggcccgccaaccacacaaagctgaaagacccctccgagtatgtggccaacagtgcgtcagcattgttcagccaggacatctctgttaagatggcgtctgattttctcatgaagctgtcagctgcaaatcagaaggagcccatgaatcttaattttaaagtgaaagaggagcctaaggaaggggagtccctaagcacgactttgcctcggtccagctatgtgttcagcccggaatctgaagtgtcagccccaggcgtctctgaggacgcactaaagccccaggaagggaagggaagtgtgctaaggcgggatgtgtcagtcaaagcagcctctgaacttctcatgaaactctcagcggaaagctacaaggaaacacagatggtgaagattaaagaggaacccatggaggttgacatccaggactcccatgtctcgatatcacccagccggaatgttggctacagcactttaatcgggcgagagaaaaccgaacccttacagaagatgccagagggcagagtacccccagagagaaacctcttcagtcaggatatctctgtgaaaatggcttccgagctcctctttcaactgtcagaaaaagtgagcaaagagcacaatcatacaaaagaaaacaccatccggaccacgaccagccctttcttttcagaagacacatttagacaatcaccattcacctccaattcaaaagaactgctgcccagtgactccgtgctgcacggaagaatatcagctccagaaacagaaaagatagtcctagaggcaggaaatggattaccatcctggaaattcaatgaccagctttttccctgtgacgtgtgtgggaaagtgtttggccgacagcagacattgtcccgacacctctcgctgcacacagaggaaagaaaatacaaatgccacttgtgcccctatgctgctaagtgccgtgcaaatctgaaccagcacttgaccgtccattccgtgaagctggtgagtacagacaccgaggacattgtcagcgccgtcacctctgaaggcagtgatgggaagaaacatccttattattacagttgtcacgtgtgtggatttgagaccgagctcaatgtccagtttgtcagccacatgtcactccacgtggacaaggagcagtggatgttttcgatctgctgcactgcctgcgacttcgtcaccatggaggaagcagagataaagactcacattggcaccaagcacacaggggaagacaggaagacccccagcgaatcaaatagcccctcttcatcctccctctcagctctgagtgattcagccaacagcaaagatgattcagatggctcccagaaaaacaagggcgggaacaatctgctggtcatctctgtcatgcctgggagccagccctcactgaacagtgaggaaaagccagagaaagggttcgaatgtgttttttgcaactttgtctgcaagacgaagaacatgtttgagcgtcatctgcagatacacctcatcacccggatgtttgagtgtgatgtgtgccacaagttcatgaagacccccgaacagctgctggagcataagaaatgccacactgtccccaccggtgggctcaagtaaggaaactcaggacagtggtgagtttcagactcctctaggtgcccattctgcatttattccaccaaccgccccgctgccatggagtgccacctcaagacccactacaagatggagtacaagtgccggatctgccagacggtgaaggccaaccagctggagctggagacgcacacccgggagcaccgcctgggcaaccactacaagtgcgaccagtgcggctacctgtccaagaccgccaacaagctcatcgagcacgtgcgcgtccacaccggggagcggcccttccactgtgaccagtgcagctacagctgcaagcgcaaggacaatctcaacctgcacaagaagctgaagcacgccccacgccagaccttcagctgcgaagagtgcctgttcaagaccacacaccctttcgtcttcagccgccacgtcaagaagcaccagagtggggactgccccgaggaggacaagaagggcctgtgtccagcccccaaggaaccggccggcccgggggccccgctcctggtggtcgggagctcccggaatctcctgtctcccctgtcagttatgtctgcctcccaggctctgcagaccgtggccctgtcggcagcccacggcagcagctcagagcccaacctggcactcaaggctttggccttcaacggctcccctttgcgctttgacaagtaccggaactcagattttgcccatctcattcccttgacaatgttataccccaagaaccacttggatctcacattccaccctccccgacctcagactgcgcctcccagcatcccctcacccaaacactccttcctggcctatctcggactgagagaaagagcagagactgtctgagggcagccatgttctgtaccaaaaacagagagacaaaagacaaaaaaaaaaaaaaaa

SEQ ID NO: 6743 - DNA, 1750 bp, Homo Sapiens
  NM_178863
ctgcccggcgccggcttccgggtggtgcgagcgagatggggcggagggccggtcttgcagagtagctgcggtgagtgggcgtgtgcgccgagcggtctggcccaagggctgggggccggccgagggtcttcgggagcaggccgcagggcgcggagagatcctgggatcgccgtccgccgctgctacccggcatgtcggcggaggcctcgggcccggctgccgccgcggccccgtccctggaagcccccaagccctcgggtctcgagcctggccccgccgcctacggtctcaagccgctgaccccgaacagcaaatacgtgaagctgaacgtgggcggctcgttgcactacaccacgctgcgcaccctcacgggacaggacaccatgctcaaagccatgttcagcggccgcgtggaggtgctgaccgatgccggaggttgggtgctgattgaccggagcggccgtcactttggtacaatcctcaattacctgcgggatgggtctgtgccactgccggagagtacgagagaactgggggagctgctgggcgaagcacgctactacctggtgcagggcctgattgaggactgccagctggcgctgcagcaaaaaagggagacgctgtccccgctgtgcctcatccccatggtgacatctccccgggaggagcagcagctcctggccagcacctccaagcccgtggtgaagctcctgcacaaccgcagtaacaacaagtactcctacaccagcacttcagatgacaacctacttaagaacatcgagctgttcgacaagctggccctgcgcttccacgggcggctactcttcctcaaggatgtcctgggggacgagatctgttgctggtctttctacgggcagggccgcaaaatcgccgaggtgtgctgcacctccattgtctatgctacggagaagaagcagaccaaggtggaatttccagaggcccggatcttcgaggagaccctgaacatcctcatctacgagactccccggggcccagacccagccctcctggaggccacagggggagcagctggagctggtggggctggccgcggggaggatgaagagaaccgagagcaccgtgtccgcaggatccatgtccggcgccatatcacccacgacgagcgtcctcatggccaacaaattgtcttcaaggactgacctctgaccctccccctgccttcctcttgccttgggacccagtccctctctctttccctccccttcccagacttttgccccggctctgctggccaagtcgtgggtcctcctctgtcccttcattgcatggcacagctcactttggcccttctccacccatcccaaccccattgctaacaacatggtacattccggccccaccactcagagccttccgaagccaacacttgtccccaccctggccctgcgtccttccctctccagctggttaagagggatttagaattccctttctctttttttagtgcatcgtccatgccaaagtgtgcggcccttcctgacatcaccacagtctgagcagcctcccgcgtcctgcagggtagtccgccccctcctccccaccatcctccctacctccttaactttgtactagactggcctgggcctgcccagctcagcgttatcagtctgtttcatattatttattattttaattttctattaaattattgaaataaagttaagttgagaaaaaaaaaaaaaaaaaaaaaagaaaaaaaaaaaaaaaa

SEQ ID NO: 6744 - DNA, 2060 bp, Homo Sapiens
  NM_178865
cgagcgccgccggaaagcgtcgagcggcttcggtaggtggggcggggccggggcggggccggggccggggaggggccaggcccggcacccggatcccgaggtccgcgccccgcgcccggcgccgggcgcccgaagccgggagccgccgccatgggggcctgcctgggagcctgctccctgctcagctgcgcgtcctgcctctgcggctctgccccctgcatcctgtgcagctgctgccccgccagccgcaactccaccgtgagccgcctcatcttcacgttcttcctcttcctgggggtgctggtgtccatcattatgctgagcccgggcgtggagagtcagctctacaagctgccctgggtgtgtgaggagggggccgggatccccaccgtcctgcagggccacatcgactgtggctccctgcttggctaccgcgctgtctaccgcatgtgcttcgccacggcggccttcttcttctttttcaccctgctcatgctctgcgtgagcagcagccgggacccccgggctgccatccagaatgggttttggttctttaagttcctgatcctggtgggcctcaccgtgggtgccttctacattcctgacggctccttcaccaacatctggttctacttcggcgtcgtgggctccttcctcttcatcctcatccagctggtgctgctcatcgactttgcgcactcctggaaccagcggtggctgggcaaggccgaggagtgcgattcccgtgcctggtacgcaggcctcttcttcttcactctcctcttctacttgctgtcgatcgcggccgtggcgctgatgttcatgtactacactgagcccagcggctgccacgagggcaaggtcttcatcagcctcaacctcaccttctgtgtctgcgtgtccatcgctgctgtcctgcccaaggtccaggacgcccagcccaactcgggtctgctgcaggcctcggtcatcaccctctacaccatgtttgtcacctggtcagccctatccagtatccctgaacagaaatgcaacccccatttgccaacccagctgggcaacgagacagttgtggcaggccccgagggctatgagacccagtggtgggatgccccgagcattgtgggcctcatcatcttcctcctgtgcaccctcttcatcagtctgcgctcctcagaccaccggcaggtgaacagcctgatgcagaccgaggagtgcccacctatgctagacgccacacagcagcagcagcaggtggcagcctgtgagggccgggcctttgacaacgagcaggacggcgtcacctacagctactccttcttccacttctgcctggtgctggcctcactgcacgtcatgatgacgctcaccaactggtacaagcccggtgagacccggaagatgatcagcacgtggaccgccgtgtgggtgaagatctgtgccagctgggcagggctgctcctctacctgtggaccctggtagccccactcctcctgcgcaaccgcgacttcagctgaggcagcctcacagcctgccatctggtgcctcctgccacctggtgcctctcggctcagtgacagccaacctgccccctccccacaccaatcagccaggctgagcccccacccctgccccagctccaggacctgcccctgagccgggccttctagtcgtagtgccttcagggtccgaggagcatcaggctcctgcagagccccatccccccgccacacccacacggtggagctgcctcttccttcccctcctccctgttgcccatactcagcatctcggatgaaagggctcccttgtcctcaggctccacgggagcggggctgctggagagagcggggaactcccaccacagtggggcatccggcactgaagccctggtgttcctggtcacgtcccccaggggaccctgcccacttcctggacttcgtgccttactgagtctctaagactttttctaataaacaagccagtgcgtgtaccatgaaaaaaaaaaaaaaaaaaaaaaaaaaaaaaaaaaaaaaaaaaaaaaaaaaaaaaaaaaaaa

SEQ ID NO: 6745 - DNA, 1185 bp, Homo Sapiens
  NM_178868
ggcctccaccgccttccccggctgcccggcagcctcccctcgctcgctctcctcttcctctagggccccagcgcagctcgggagcccgcgcaccgaggcgctaggggcaccgcgcactagagggacacccgccgcgcctggacagcccccggcgggcgcccccctcgcacctcctgccccgcgcgggccgcgctcccctcccccgcgcctgtgtccccagggcgcagggccgcgcgtccagccccagacccgccggggtccctggggacgcgccagcccggcagtggctcgacgatggaggagccgcagcgcgcccgctcgcacacagtcaccaccaccgccagctccttcgcagagaacttctccaccagcagcagcagcttcgcctacgaccgggagttcctccgcaccctgcccggcttcctcatcgtggccgagatcgttctggggctgctggtatggacgcttattgctggaactgagtacttccgggtccccgcatttggctgggtcatgtttgtagctgtattttactgggtcctcaccgtcttcttcctcattatctacataacaatgacctacaccaggattccccaggtgccctggacaacagtgggcctgtgctttaacggcagtgccttcgtcttgtacctctctgccgctgttgtagatgcatcttccgtctcccctgagagggacagtcacaacttcaacagctgggcggcctcatcgttctttgccttcctggtcaccatctgctacgctggaaatacatatttcagttttatagcatggagatccaggaccatacagtgatttaccattttgataattaaaaggaaaaaaaaaggaagactctcactgtaaaaacagctgtaggtataatgtatattcccagagaattgtatttaactaattaatgttttttatattcttaaatttgctcacaaattgtggtttgttacaattaaactggatacttatttgcaaagtgttgtagcttataatgaactcttaagtatcttattaatgtattaatgtcttcatagatcatattttcttagacaatgtttaaatagataaattgctaatattgagaatgtgtcaagtttgtaaacctaacttttaagatgccagattcttttttgattaaatgttgcaaaatcccaaaaaaaaaaaaaaaaa

SEQ ID NO: 6746 - DNA, 2871 bp, Homo Sapiens
  NM_180976
gagacgccgagcgggccgagtgcggccgagcaaagccggagccggagcggggccgcaggagacgggccgggtccggacgggccgagatgccctataaactgaaaaaggagaaggagccccccaaggttgccaaatgcacagccaagcctagcagctcgggcaaggatggtggaggcgagaacactgaggaggcccagccgcagccccagccccagccccagccccaagcccagtctcagccaccgtcatccaacaagcgtcccagcaatagcacgccgccccccacgcagctcagcaaaatcaagtactcaggggggccccagattgtcaagaaggagctgtttatccagaagctacgccagtgctgtgtcctctttgacttcgtgtcagacccactcagtgacctcaaattcaaggaggtgaagcgggcaggactcaacgagatggtggagtacatcacccatagccgtgatgttgtcactgaggccatttaccctgaggctgtcaccatgttttcagtgaacctcttccggacgctgccaccttcatcgaatcccacaggggctgagtttgacccagaggaagatgagcccaccctggaagctgcttggccacatctccagctcgtgtatgagttcttcttacgtttccttgagtctcctgatttccagccaaacatagccaagaagtacatcgaccagaagtttgtacttgctctcctagacctatttgacagtgaggatcctcgagagcgggacttcctcaagaccattttgcatcgcatctatggcaagtttttggggctccgggcttatatccgtaggcagatcaaccacatcttctacaggttcatctacgagacggagcatcacaacgggattgctgagctcctggagatcctgggcagcatcatcaatggctttgccctgccccttaaagaagagcacaagatgttcctcatccgtgtcctacttccccttcacaaggtcaagtccctgagtgtctaccaccctcagctggcatactgtgtggtacaattcctggagaaggagagcagtctgactgagccggtaattgtgggacttctcaagttttggcccaagacccacagccccaaggaggtgatgttcttgaatgagctggaggagattctggacgtcattgaaccttctgagttcagcaaagtgatggaacccctcttccgccagctggccaagtgtgtctctagcccccatttccaggtggcagagcgtgctctctattactggaacaatgagtacatcatgagcctgataagtgacaatgctgcccgagtcctccccatcatgttccctgcactctacaggaactccaagagccactggaacaagacaatccatggactgatctataatgccctgaagttgtttatggaaatgaatcagaagctgtttgatgactgcacacaacaatacaaggcagagaagcagaagggccggttccgaatgaaggaaagggaagagatgtggcaaaaaatcgaggagctggcccggcttaatccccagtatcccatgttccgagcccctccaccactgccccctgtgtactcgatggagacagagacccccacagctgaggacatccagcttctgaagaggactgtggagactgaggctgttcagatgctaaaagacatcaagaaggagaaagtgctgctgcggaggaagtcggagctgccccaggacgtgtacaccatcaaggcactggaggcgcacaagcgggcggaagagttcctaactgccagccaggaggctctctgacccctcacgttcctaccacagggccacagcccacacagccctgggacactgccctggccctccatactctgctccctactggctgtcttgggggaaggcagcgcctctctagctactcaagggagggggatgtgggcacttgaagcagggacacccacagaatggtccctcttctccccaaaaggtgttcatgcctccctgtggctagtacaggctgagcactaagatgcttagtgctcagacaacctggggatgcctgtcccctacctgctcctcacccacagctacctgaggctgctctgagaagtacacacaggaatacatacgctcctctattcttcccttcatcctcatttgaacgccaggtatctcccctcctctctctcccctgcagaggcatgtagggaacagcaggagattattctcaccaaagttatgtcaagccccattggtcccagagtagctgaagggaagccaacccccctgcagcacaaataggccccccagtcccagccgtgtgctggcagatagggttgtattatttcttcttaccccatgcctgaccaagggaggtcaaaaggagaaaagtataggctgtggacaataactgatgaatatagggcccagatggaccaagtggggccggggagggatgaataaacaccctaccccgtgccctgtctttggtgagcagcagccctggggtcacagacatggaagggaccaccctggggctgactgcttttctgtgctgttggttcccaaaactagaaagaaggaagcagggagcggtgccccaagcatggctcctgccaacacctatttatttccttgtttgtgctatgctgggcaggccttctcttgtcccttataggtaccttggaggggccaggggctgaggaaggccggacccaggttccaggggcgcaggcagtgcggcttttggctgtgtacatagggtgctttattctccacagagtgatacatgctaaggtgggttgggcttggaccgatgtccccatatgtacagaactgaataaagtgggtctctgagaaaaaaaaaaaaaaaaaa

SEQ ID NO: 6747 - DNA, 1188 bp, Homo Sapiens
  NM_180981
ggctaccccggctactcctgctcagcatggctgctttagggactgttctcttcacaggtgtccggaggctgcactgcagcgtagccgcttgggcgggcggccagtggcgactacagcagggactggctgccaacccctccggctacgggccccttaccgagctcccagactggtcatatgcgggggtatgatcctgcttaattggataattggtgactgaggaagatggtgaagattttttctacttgttatttactatggccgccctgctcccccaatgaaaggccagcttcgaagaaaagctgaaagggagacgtttgcaagacgagttgtactgctgtcacaggaaatggacgctggattacaagcatggcagctcaggcagcagaagttgcaggaagaacaaaggaagcaggaaaatgctcttaaacccaaaggggcttcactgaagagcccacttccaagtcaataaaaagcaactcctgcctcccttcctcaccctgtctctggatttcttttctatcacctagatgcttcatccagccagaagatagccttcacgttccccatctgtcttcagagaaaaagagctgggacaccaagaacaagctgttagatcactgcctgggaggcttggcttagtactctcatctctggttccattccagttcagctaagtcttgctttaaaatttttacctcctagctgggtgcggtggctcacgcctgtaatcccagcactttgggaggctgaggcgggcagatcacaagatcaggagttcgagaccagcctggccaacccagcctggtcaacatggtgaaaccctgtccctactaaagatacaaacaattagccgggcgtggtggggtgcgcttgtaatcccagctactcaggaggctgaggcaggagaatcgcttaaactcgggaggtagaggttgcagtgagccaaggtcacaccattgcactccaacctgggcgacagggcgagactccgtctcaaaaaaaaaaaaaaatttacctcctttgcaggccataggactagcccaactatgagaaatagctgttctgtgaacgtgaaaaggggacagcagttttcccagttttggccaggcagtcaagcctttaacagctcatgcacagtttaggccatgtacagctggcatctaataaatgttttcatgaaaaaga

SEQ ID NO: 6748 - DNA, 5334 bp, Homo Sapiens
  NM_180991
cccacgccgcgccttccggttggtccttgaggcgacgggtgaggcacagctgagcgccaaagccacaggctggggcgctaacgcccccgctcagcgctctgcgctccagacagctgcgagctggagtaggaaggttcaggcggtggcggagagtgcgctggaggctggagggccaggaggcgggaagcttcccgcacgggggcgctgtcacctgcctgtgggaggagccagagagggacctggctctgctgctctgaagcaccggagtcgggagaacccatccagacatgaagagcgccaaaggtattgagaacttggcttttgtcccctccagcccagacatcctgcgccgcttgtctgcgtcgccctcccaaatcgaagtctctgccttgtcctctgacccccaaagagagaattctcagccacaggagcttcagaagccccaggagccccagaagtcaccagagccatctctgccttcagcccctcccaatgtctccgaagagaagctccggtcactgtcgctgtccgagtttgaggaggggtcttacggctggaggaacttccatcctcaatgtctccagcgctgcaacacacctggaggctttctgcttcactactgcctcttggccgtcacgcaaggtattgtagttaatggcctagtaaatattagcatttccactgttgagaagcgttatgaaatgaagagttccctgactggcctgatttcatcaagctacgatatttcattctgtttgttgtctttatttgtatcattctttggtgaaagaggacataagccgagatggcttgcatttgcagcctttatgattggactgggagcacttgtattctcattgccacaatttttcagtggagaatataaattggggtctctttttgaagacacttgtgtaacaacaaggaatagcaccagttgtacatcttcaacttcttcactttctaactacttgtatgtcttcatcttgggacaactattgctgggggcaggaggaactcctctttatactctgggaacagcctttcttgatgattctgtgcccacacacaagtcttctctctatataggaaccggttatgctatgtcaatcttaggccctgctattggctatgtattgggaggacaactgctaaccatatacattgatgttgctatgggagaaagcactgatgtcactgaggatgatccgcgatggttgggagcttggtggattgggtttcttctatcatggatctttgcttggtctttaataatacctttttcttgctttccaaaacatttaccaggtacagcagaaattcaagctggaaaaacttcccaggctcatcagagtaatagtaatgcagatgtgaaatttggaaaaagtattaaagattttccagctgctctaaagaatttgatgaagaatgctgtctttatgtgtttagttctatcaacttcttcagaagccttaattactactggatttgctacatttttacctaaatttatagaaaatcaattcggattgacatccagcttcgcagctactcttggaggggctgttttaattcctggagctgctctcggtcaaattttaggtggcttccttgtttcaaaattcagaatgacatgtaaaaacacaatgaagtttgcactgttcacatctggagttgcacttacgctgagttttgtatttatgtatgccaaatgtgaaaatgagccatttgctggtgtatctgaatcatataatgggactggagaattgggaaacttgatagccccttgtaatgccaattgtaactgttcgcgatcatattattatcctgtctgtggagatggagtccaatatttttctccctgctttgcaggctgttcaaacccagttgcacacaggaagccaaaggtatattacaactgttcctgtattgaaaggaaaacagaaataacatccactgcagaaacttttggttttgaagctaaagctggaaaatgtgaaactcattgtgcgaaactgcccatattcctttgcattttctttattgtaattatttttacctttatggccggtactcctataactgtgtctatcctaaggtgtgttaatcacagacaacggtccctagccttgggaatacaatttatggtccttcgattattagggacaattcctggaccaattatatttggtttcacaatagacagcacatgtattctttgggatataaatgattgtggaattaaaggagcttgctggatttatgataacatcaagatggcccatatgctagtagccataagtgttacttgtaaagttatcaccatgttcttcaatggatttgcaatctttttgtataaaccacctccatcagccacagatgtgtcatttcataaagagaatgcagttgtgactaatgttttagcagaacaggatctcaacaaaatagtaaaagaagggtgaaatgggaaaagagaagactgttttacacctggaaaatttacctcgatttttaagaacacacattgccatggcaggattatctatccaatatggacaatcatatttacaaaattgatgtttttataatcaaatgtatttttttacttatgtagtttttgttttatgcaagaaacagacctgtgccttcaaagcccacgtaaagcctcaaaacacagcacacacacacacgagcacacacacacacacacacacgaacacacacacacacacacacacgcacacatacacacttatttcctattcccattgtctaggtatgaaatcctcaagcaataacaagaaaaaaggcccacaattagaaaaatttacatttaaaaaaaatgttgtttctatccccattacaacttgtttaattttaattttcattgtcaatattttgagcttagaacatttatggtataaaaatttaaactaatcaaagttgtgtgatgatttccgggaattattattgaaagcctatgaatttaaaaccaggtttaccatgtaatttgtttttaaatttatgtatactagcctggcctttctccaagcaaattattgaactattagaatatgttagttatcatccttgtgtcttagtatatagtgaatacagaaacatcagcattgtatacacatattttcactttaactcaagaattccaggaggtaatttgttgatattacaatttttaacacatttatgattctgtgataatattattcaattgcatatatttcagaggaaagtaccagtcagtaaagaaaaatgccaactaaacatgaaactattgatcaatacttatatacctttaatttttcctatttgaaaagccaaccacttaacacattactcatagcacctaagacagtgccttgcatagtgtagtcatctattattattgtttaattagaatattaaaccctaccctttaactcagcagtccccaaccttttttgcatcagggaccatttttgtggaagacaatttttccatgggggaagaaggtatggttttgagatgaaactgctccacctcagaccatcaggcattagttagattctcataaggagagtgcaacctagatcccttgcatgtgcagttcccaatggagtgtgcactcctatgagaatctaatgccactactgatctaacaagaggtggagctcaggcagtaatgctcactcacctgcctctcagctcaccaactgtgtggcccgattcctaacaggccacacacagcccagggctggggacccctgctttaactgatgcattgatttgataaagtattttacaagcctgataatgttataaccctgtttattcaggtcagatttatgccaactttgctgagaatatggagggtatagatgagtgaacatcaacaaacataacttctaccatggttaagaattttacttaggaaaagtattgaagttcaaatccagatagtattacatttgaaattgttataagggttattaatttaataaaattcatcatcaggtttcccctataagctttctcctaggttaattttccacaagcattgttttatatacactgtaatcaggataacacaagcttagtgttagatcttgtaggaaaccaagattagaaacattagaaatttgcagaatttaagaaattatgttttgtggtaatctatggccaacgatgttagaacctagcgcaattgtaaagtgaaattcaaggagaaggaatgaggagttagggaagcagcatacttgaatattagagaaggagaggagctgtgggtcaggaatcagagagacctgctaaaaccagacagatataaacaccaaagacggaagccaaataggtagccaaaaatccagatatttgagaagcaggaaatttatagcaaccaaagaaatagggcaagagaggcaggtgaacacacatgatacctcaattgacaatcttcctcccaccaagccagacacgttgtaaatgctgcttcctattggagcccagaaaaaaggaaaaggaaagtttaggctttctttgtcctttgtgtggaagcagggaattggattgaagactttcatagttgtaacataaaggcaaatcctgaggaactcactgatggagatgtgaaatggcagtaaggaagaaaacagaataactgaacaaatatattagtctagggccacttaatttagaggaagaaaaaaaatcaacccatccatagaaatagtttgataaacaggtcactaaatcattggcgtttataaagattcttagctatcaagggctgcattgtattttatatactcagttttataaggtgatactttttaaataagcgctttaatgaaaatggttagactgaaaataattttggtccttaaaaggagtcaggagcttttatatataaggtacatattttaaaagaatacctcctttataacagggttttacagacactaccataatttataatcattattttttacttttgggttcacctagatcatatgagttgatgtgatacttctagaacaaaattattcatagtgcgttttttgtaatttatgattgttaagtaagcttgacttataaattgacattgtaattgtgtacataattggatatatgtgttaaaatttaacatttagatttacttaattgtagaaaatacaaatgtaaaacttacacatggaaagaactgtatgcagttgactttactatgtaaattggagggaaacaaagttttagatccattttctttcaaaattttctttattgtaaagtatgcaaaatatatattcataccatttattaaatcagaatgtttatacaaaa

SEQ ID NO: 6749 - DNA, 3567 bp, Homo Sapiens
  NM_181050
tctggctcgggctctggctcgggaggcgatcgtggccgctgccgccgccagagccggccggagtcggcccggagccgcgtccacgcggagcgggcgggtgggagctggcggctgggcccctgcggcgcccccgcggcctgccccgcgtccgcctccgggccgccgagccgcagccgccgagatgggggccgccccgggccgcgcccccgccgggtcccgcccgccgcgctgccgctgagcgcatgggcccggaccgcgccgcgccgctccgggagccgggcccggggtcccgccaccaccgcgcgcgggacagattgattcactttggagctgtaagtactgatgtattagggtgcagcgctcattgttccttgacgcagagtcccaaaatgaatatccaagagcagggtttccccttggacctcggagcaagtttcaccgaagatgctccccgacccccagtgcctggtgaggagggagaactggtgtccacagacccgaggcccgccagctacagtttctgctccgggaaaggtgttggcattaaaggtgagacttcgacggccactccgaggcgctcggatctggacctggggtatgagcctgagggcagtgcctcccccaccccaccatacttgaagtgggctgagtcactgcattccctgctggatgaccaagatgggataagcctgttcaggactttcctgaagcaggagggctgtgccgacttgctggacttctggtttgcctgcactggcttcaggaagctggagccctgtgactcgaacgaggagaagaggctgaagctggcgagagccatctaccgaaagtacattcttgataacaatggcatcgtgtcccggcagaccaagccagccaccaagagcttcataaagggctgcatcatgaagcagctgatcgatcctgccatgtttgaccaggcccagaccgaaatccaggccactatggaggaaaacacctatccctccttccttaagtctgatatttatttggaatatacgaggacaggctcggagagccccaaagtctgtagtgaccagagctctgggtcagggacagggaagggcatatctggatacctgccgaccttaaatgaagatgaggaatggaagtgtgaccaggacatggatgaggacgatggcagagacgctgctccccccggaagactccctcagaagctgctcctggagacagctgccccgagggtctcctccagtagacggtacagcgaaggcagagagttcaggtatggatcctggcgggagccagtcaacccctattatgtcaatgccggctatgccctggccccagccaccagtgccaacgacagcgagcagcagagcctgtccagcgatgcagacaccctgtccctcacggacagcagcgtggatgggatccccccatacaggatccgtaagcagcaccgcagggagatgcaggagagcgtgcaggtcaatgggcgggtgcccctacctcacattccccgcacgtaccgggtgccgaaggaggtccgcgtggagcctcagaagttcgcggaggagctcatccaccgcctggaggctgtgcagcgcacgcgggaggccgaggagaagctggaggagcggctgaagcgcgtgcgcatggaggaggaaggtgaggacggcgatccatcgtcagggcccccagggccgtgtcacaagctgcctcccgcccccgcttggcaccacttcccgccccgctgtgtggacatgggctgtgccgggctccgggatgcacacgaggagaaccctgagagcatcctggacgagcacgtacagcgtgtgctgaggacacctggccgccagtcgcctgggcctggccatcgctccccggacagtgggcacgtggccaagatgccagtggcactggggggtgccgcctcggggcacgggaagcacgtacccaagtcaggggcgaagctggacgcggccggcctgcaccaccaccgacacgtccaccaccacgtccaccacagcacagcccggcccaaggagcaggtggaggccgaggccacccgcagggcccagagcagcttcgcctggggcctggaaccacacagccatggggcaaggtcccgaggctactcagagagtgttggcgctgcccccaacgccagtgatggcctcgcccacagtgggaaggtgggcgtggcgtgcaaaagaaatgccaagaaggctgagtcggggaagagcgccagcaccgaggtgccaggtgcctcggaggatgcggagaagaaccagaaaatcatgcagtggatcattgagggggaaaaggagatcagcaggcaccgcaggaccggccacgggtcttcggggacgaggaagccacagccccatgagaactccagacccttgtcccttgagcacccctgggccggccctcagctccggacctccgtgcagccctcccacctcttcatccaagaccccaccatgccaccccacccagctcccaaccccctaacccagctggaggaggcgcgccgacgtctggaggaggaagaaaagagagccagccgagcaccctccaagcagaggacaagatcgcagaggaaggtgggcggcgggagtgcccagccgtgtgacagcatcgttgtggcgtactacttctgcggggaacccatcccctaccgcaccctggtgaggggccgcgctgtcaccctgggccagttcaaggagctgctgaccaaaaagggcagctacagatactacttcaagaaagtgagcgacgagtttgactgtggggtggtgtttgaggaggttcgagaggacgaggccgtcctgcccgtctttgaggagaagatcatcggcaaagtggagaaggtggactgataggctggtgggctggccgctgtgccaggcgaggcccttggcgggcacgggtgtcacggccaggcagatgacctcgtactcaggagcccgatggggaacagtgttgggtgtaccacccatccctgtggtctacccgtgtctagaggcaggtagggggtccctccaagtggtccacaagcttctgtcctgcccccaaggaggcagcctggaccactcctcatagcaatacttggagggcccagcccaagtgaggcagccgaggtccctgctgccagcttcaggtgacccccccccatcccccggcacctcccttgggcacgtgtgctgggatctactttccctctgggatttgcccacgtacccaggtctgggtggggcccaggcccggatgcagaggcctgcagggcctctgtcaattgtacgcgccaccgagtgccttcaacacagcttgtctcttgcctgccactgtgtgaatcggcgacggagcactgcacctgcctccagccgccggctgtgcagtcctgggtcctcctttctgagggcccgtgtaaatatgtacatttctcaggctaggccagcaggggctgcccgagtctgtttttcatgcgatgacacttgtacaattaattatcttttcaaaggtacttggataataatgaaataaaactgtttttgaacctgcaaaaaaaaaaaaaaa

SEQ ID NO: 6750 - DNA, 3955 bp, Homo Sapiens
  NM_181054
gcgcgcgccggcctgggcaggcgagcgggcgcgctcccgccccctctcccctccccgcgcgcccgagcgcgcctccgcccttgcccgccccctgacgctgcctcagctcctcagtgcacagtgctgcctcgtctgaggggacaggaggatcaccctcttcgtcgcttcggccagtgtgtcgggctgggccctgacaagccacctgaggagaggctcggagccgggcccggaccccggcgattgccgcccgcttctctctagtctcacgaggggtttcccgcctcgcacccccacctctggacttgcctttccttctcttctccgcgtgtggagggagccagcgcttaggccggagcgagcctgggggccgcccgccgtgaagacatcgcggggaccgattcaccatggagggcgccggcggcgcgaacgacaagaaaaagataagttctgaacgtcgaaaagaaaagtctcgagatgcagccagatctcggcgaagtaaagaatctgaagttttttatgagcttgctcatcagttgccacttccacataatgtgagttcgcatcttgataaggcctctgtgatgaggcttaccatcagctatttgcgtgtgaggaaacttctggatgctggtgatttggatattgaagatgacatgaaagcacagatgaattgcttttatttgaaagccttggatggttttgttatggttctcacagatgatggtgacatgatttacatttctgataatgtgaacaaatacatgggattaactcagtttgaactaactggacacagtgtgtttgattttactcatccatgtgaccatgaggaaatgagagaaatgcttacacacagaaatggccttgtgaaaaagggtaaagaacaaaacacacagcgaagcttttttctcagaatgaagtgtaccctaactagccgaggaagaactatgaacataaagtctgcaacatggaaggtattgcactgcacaggccacattcacgtatatgataccaacagtaaccaacctcagtgtgggtataagaaaccacctatgacctgcttggtgctgatttgtgaacccattcctcacccatcaaatattgaaattcctttagatagcaagactttcctcagtcgacacagcctggatatgaaattttcttattgtgatgaaagaattaccgaattgatgggatatgagccagaagaacttttaggccgctcaatttatgaatattatcatgctttggactctgatcatctgaccaaaactcatcatgatatgtttactaaaggacaagtcaccacaggacagtacaggatgcttgccaaaagaggtggatatgtctgggttgaaactcaagcaactgtcatatataacaccaagaattctcaaccacagtgcattgtatgtgtgaattacgttgtgagtggtattattcagcacgacttgattttctcccttcaacaaacagaatgtgtccttaaaccggttgaatcttcagatatgaaaatgactcagctattcaccaaagttgaatcagaagatacaagtagcctctttgacaaacttaagaaggaacctgatgctttaactttgctggccccagccgctggagacacaatcatatctttagattttggcagcaacgacacagaaactgatgaccagcaacttgaggaagtaccattatataatgatgtaatgctcccctcacccaacgaaaaattacagaatataaatttggcaatgtctccattacccaccgctgaaacgccaaagccacttcgaagtagtgctgaccctgcactcaatcaagaagttgcattaaaattagaaccaaatccagagtcactggaactttcttttaccatgccccagattcaggatcagacacctagtccttccgatggaagcactagacaaagttcacctgagcctaatagtcccagtgaatattgtttttatgtggatagtgatatggtcaatgaattcaagttggaattggtagaaaaactttttgctgaagacacagaagcaaagaacccattttctactcaggacacagatttagacttggagatgttagctccctatatcccaatggatgatgacttccagttacgttccttcgatcagttgtcaccattagaaagcagttccgcaagccctgaaagcgcaagtcctcaaagcacagttacagtattccagcagactcaaatacaagaacctactgctaatgccaccactaccactgccaccactgatgaattaaaaacagtgacaaaagaccgtatggaagacattaaaatattgattgcatctccatctcctacccacatacataaagaaactactagtgccacatcatcaccatatagagatactcaaagtcggacagcctcaccaaacagagcaggaaaaggagtcatagaacagacagaaaaatctcatccaagaagccctaacgtgttatctgtcgctttgagtcaaagaactacagttcctgaggaagaactaaatccaaagatactagctttgcagaatgctcagagaaagcgaaaaatggaacatgatggttcactttttcaagcagtaggaattatttagcatgtagactgctggggcaatcaatggatgaaagtggattaccacagctgaccagttatgattgtgaagttaatgctcctatacaaggcagcagaaacctactgcagggtgaagaattactcagagctttggatcaagttaactgagctttttcttaatttcattcctttttttggacactggtggctcattacctaaagcagtctatttatattttctacatctaattttagaagcctggctacaatactgcacaaacttggttagttcaattttgatcccctttctacttaatttacattaatgctcttttttagtatgttctttaatgctggatcacagacagctcattttctcagttttttggtatttaaaccattgcattgcagtagcatcattttaaaaaatgcacctttttatttatttatttttggctagggagtttatccctttttcgaattatttttaagaagatgccaatataatttttgtaagaaggcagtaacctttcatcatgatcataggcagttgaaaaatttttacaccttttttttcacattttacataaataataatgctttgccagcagtacgtggtagccacaattgcacaatatattttcttaaaaaataccagcagttactcatggaatatattctgcgtttataaaactagtttttaagaagaaattttttttggcctatgaaattgttaaacctggaacatgacattgttaatcatataataatgattcttaaatgctgtatggtttattatttaaatgggtaaagccatttacataatatagaaagatatgcatatatctagaaggtatgtggcatttatttggataaaattctcaattcagagaaatcatctgatgtttctatagtcactttgccagctcaaaagaaaacaataccctatgtagttgtggaagtttatgctaatattgtgtaactgatattaaacctaaatgttctgcctaccctgttggtataaagatattttgagcagactgtaaacaagaaaaaaaaaatcatgcattcttagcaaaattgcctagtatgttaatttgctcaaaatacaatgtttgattttatgcactttgtcgctattaacatcctttttttcatgtagatttcaataattgagtaattttagaagcattattttaggaatatatagttgtcacagtaaatatcttgttttttctatgtacattgtacaaatttttcattccttttgctctttgtggttggatctaacactaactgtattgttttgttacatcaaataaacatcttctgtggaccaggcaaaaaaaaaaaaaaaaaaaaaaa

SEQ ID NO: 6751 - DNA, 4264 bp, Homo Sapiens
  NM_181077
gcctctgggtcagttacgcagctgtcttccaggtgactggatgtgttgatcagcgctcgctgggatttggctgacgtggccccagccccgcctccctccccaccccacaatggcagaagaaactggacagagtaaattagctgcagccaagaaaaagttcaaagaatattggcagagaaaccgccctggtgttccagcagcagcgaagaggaacacgaaagcaaatggcagtagccctgagacggccgcttctggtggttgccactcatctgaggcttcctcctccgcctcctcctctctgcatgcgcgtcagagcccgtgccaagaacaagcagcagtcctgaactcgaggtccataaaaatcagtcgactgaatgacaccatcaaatctttgaaacaacagaagaaacaagtggaacatcagctggaagaagaaaagaaagcaaacaatgagaaacagaaagctgaaagggagctagagggtcaaatccagagattgaacacagagaaaaagaaactaaatacggacctgtatcacatgaaacattctctcagatactttgaagaagagtccaaggatctggccggccgcctgcaacgttcatcgcagcgtataggagagttagagtggtctctctgtgctgtcgccgccacacagaagaagaagccggatgggttctcgagccgcagtaaagcacttctcaagcggcagttagagcagtccatacgggagcagatactgctgaaaggacacgtgacacagttgaaggagtcgcttaaagaagtccagctggagagagatcaatatgctgaacaaataaaaggagagagggcccagtggcagcagaggatgaggaaaatgtcgcaggaggtttgcacattgaaggaggagaagaagcatgatacgcatcgggtagaggagctggagaggagcttgtccagactcaaaaaccagatggctgagccactgcccccggatgccccagcagtgtcctctgaggtggagctgcaagacctgaggaaggagctggagagagtggcaggagagctccaggctcaggtggaaaacaatcagtgcatcagtctcctgaaccgtgggcaaaaggagaggcttcgcgagcaggaggagaggcttcaggagcagcaggagaggcttcgggaacgggagaagaggcttcagcagctggccgagccacagagcgacttggaggagctgaagcacgagaacaagagcgcactgcagttggagcagcaagtaaaggagctgcaggagaagctgggccaggtgatggagacgctcacctcggccgagaaggagccagaggcagcagtcccagcctcagggactgggggcgagtctagcggccttatggacctcctggaggagaaggcggacctgagggagcatgtggagaaactggaacttggattcatccagtaccggagagagagatgccatcagaaagtacatcgccttctaacagagccaggggacagtgccaaagatgcgtcaccgggaggaggccatcatcaggctggcccaggacaaggaggagaggaaggtgaagctgctggagctgcaggagatggtgttgcggcttgtggcagctacagcgaggggcacggcaaattcctggccgctgcccggaaccctgctgctgaacccagtccaggagccccagccccccaggagctcggggctgccgacaagcatggtgatctttgtgaggcgagcctcaccaacagcgtggagcctgcacaaggagaagccagggagggttcttcccaggacaaccctactgcacagccagtcgtgcagctccttggtgagatgcaggaccaccaggagcacccaggcttgggcagcaactgctgtgtgccatgcttttgctgggcttggctgccgagaagaaggagataaacaccaccatcatcaaagagctgctcaagaaatttttaaaaacgaaacaaagttatggggttaatctcctacacaattcatttacttcatttgaatgttagagctactcatgattatttgtgtttctaatttatagtttaagtttatttgtaaaaagttaaaagagagtgggtctctgtggctctcactgatgttcactctggcatccttcagcatttttcttttttcatttcataattgtaggtcattagcatgcatatcgagtttgcccttacgtggtgggagttcaaacacacaaagacccactctttgcacaaaactgttctcgctggtttggaataggctcccgtgcttttctaatgttattgcagcatggatgtccattacagaattcagataaaatttgctaatgttctgctatgatgtttgatctcatcttaatcacagtgagctcttctatagctcaatatgcggtttgccctcaagtgtgcactgtttattactttgtaatatgccactgtgagtactgacatttagagctgtttaaaggccgagaactggaaacagcctttcctccattttctgtgtattggtgatgggagtgataaccttttgggggagctttctaaatctcacagaagaggaaagtggcctgctctggcaggtatgtgcaggatacagtgtgtttcatctgttccggtgccaagaatgagcagtgtactgtggcagttccctttggatttgtatgtgctctgggctcatgaagatattgcatcgtgagctgcagcagttgcactctttttcagtgacctaaaaagggcttatttccgaggaatgaaaggctgccatcattggctgtgggtgtgaaaaacctttcctagcttagagcatttgtatctacaatacattttaaagtcagagttcgtgttccctgttttaatcacatgactacctgtcccagtacacgaaagggcgctggttggcattcttcttaatgtatttagtgaagatcataagaaatcctttaagagtttaaatgtctctgaaacaggcatacaggctctagtcaagaatgaattagagtgaaggaaagctgtgtgacacctggcattcctctctgttcatggagcttctttgaggcttgaagtttgattttactatctagacctctctggctaatacctattcttcaaccacctcggttactctgacataggaatttacttcttttccttgagtggaaaacactttagaaagtaataacaaacattattataaactaatatatgtgagagtacttagttgaaacaaaaaggaattttagtagacagtattatattatctttgaaaatcaaggagaagtttatgcaacttaaaatgtttacacactgtggtgcaatctactgtttgtgaatgtctgtattatcaggaaacatgtctatacgatcgcagagttgtatttcctcacaaacttctttacgaagagtgaaatacgtttttgtacctctcattttcagtcagggacatactttgtgcaatatttctgtgattgtgcctatgcatgatgaatgaatgcatttcaatcatacattgcctaaatcataacttgatgatgcttgggaaagaatcaacagttaaaacttcatgaagttctaatgtctgtgttccaaaacacatcacattattaggttgtagggagatatgtaggtgtgctccctggggtggggagttttctagttactagaccatctccatttttagcacttggcagcctcatgatccttttataaatgtgagattaacaggagagcagcaatacgattttgccaatggaataacagatttgccggcattcactgaaagagggcagatattgggtccttgtaacttcaactgactcttccaaattgtatgaatttatcaatgtattacacaaatccagtttcagaatgataaaaaatgttagaccaaataatgcggctaattaacagtcgtatgatttctagcccatgggtttaaaactgtatcttaaagagtcattttaaaataatataaatattaaaaaatgtaactgctatcttaatgttctgaaataaaacattttaaaatataaatcctgtagtttaaaaggaagaaatggtgggaaggaaaagtagagaaagaaatgccaattccaggccaaagcgttatttgccaagttttcttagaatgaattttaccaatgtatgagttcttgttaacagaatgtgtaacggaaatactgaaagacttttgcttaaagtggcattattgactgctgatgtgatgctactgtaatgcaataaatttttaaattgttgcaaa

SEQ ID NO: 6752 - DNA, 4865 bp, Homo Sapiens
  NM_181078
ctcttcctccccactctgcacatgcggctgggtggcagccagcggcctcagacagacccactggcgtctctctgctgagtgaccgtaagctcggcgtctggccctctgcctgcctctccctgagtgtggctgacagccacgcagctgtgtctgtctgtctgcggcccgtgcatccctgctgcggccgcctggtaccttccttgccgtctctttcctctgtctgctgctctgtgggacacctgcctggaggcccagctgcccgtcatcagagtgacaggtcttatgacagcctgattggtgactcgggctgggtgtggattctcaccccaggcctctgcctgctttctcagaccctcatctgtcacccccacgctgaacccagctgccacccccagaagcccatcagactgcccccagcacacggaatggatttctgagaaagaagccgaaacagaaggcccgtgggagtcagcatgccgcgtggctgggccgcccccttgctcctgctgctgctccagggaggctggggctgccccgacctcgtctgctacaccgattacctccagacggtcatctgcatcctggaaatgtggaacctccaccccagcacgctcacccttacctggcaagaccagtatgaagagctgaaggacgaggccacctcctgcagcctccacaggtcggcccacaatgccacgcatgccacctacacctgccacatggatgtattccacttcatggccgacgacattttcagtgtcaacatcacagaccagtctggcaactactcccaggagtgtggcagctttctcctggctgagagcatcaagccggctccccctttcaacgtgactgtgaccttctcaggacagtataatatctcctggcgctcagattacgaagaccctgccttctacatgctgaagggcaagcttcagtatgagctgcagtacaggaaccggggagacccctgggctgtgagtccgaggagaaagctgatctcagtggactcaagaagtgtctccctcctccccctggagttccgcaaagactcgagctatgagctgcaggtgcgggcagggcccatgcctggctcctcctaccaggggacctggagtgaatggagtgacccggtcatctttcagacccagtcagaggagttaaaggaaggctggaaccctcacctgctgcttctcctcctgcttgtcatagtcttcattcctgccttctggagcctgaagacccatccattgtggaggctatggaagaagatatgggccgtccccagccctgagcggttcttcatgcccctgtacaagggctgcagcggagacttcaagaaatgggtgggtgcacccttcactggctccagcctggagctgggaccctggagcccagaggtgccctccaccctggaggtgtacagctgccacccaccacggagcccggccaagaggctgcagctcacggagctacaagaaccagcagagctggtggagtctgacggtgtgcccaagcccagcttctggccgacagcccagaactcggggggctcagcttacagtgaggagagggatcggccatacggcctggtgtccattgacacagtgactgtgctagatgcagaggggccatgcacctggccctgcagctgtgaggatgacggctacccagccctggacctggatgctggcctggagcccagcccaggcctagaggacccactcttggatgcagggaccacagtcctgtcctgtggctgtgtctcagctggcagccctgggctaggagggcccctgggaagcctcctggacagactaaagccaccccttgcagatggggaggactgggctgggggactgccctggggtggccggtcacctggaggggtctcagagagtgaggcgggctcacccctggccggcctggatatggacacgtttgacagtggctttgtgggctctgactgcagcagccctgtggagtgtgacttcaccagccccggggacgaaggacccccccggagctacctccgccagtgggtggtcattcctccgccactttcgagccctggaccccaggccagctaatgaggctgactggatgtccagagctggccaggccactgggccctgagccagagacaaggtcacctgggctgtgatgtgaagacacctgcagcctttggtctcctggatgggcctttgagcctgatgtttacagtgtctgtgtgtgtgtgtgcatatgtgtgtgtgtgcatatgcatgtgtgtgtgtgtgtgtgtcttaggtgcgcagtggcatgtccacgtgtgtgtgtgattgcacgtgcctgtgggcctgggataatgcccatggtactccatgcattcacctgccctgtgcatgtctggactcacggagctcacccatgtgcacaagtgtgcacagtaaacgtgtttgtggtcaacagatgacaacagccgtcctccctcctagggtcttgtgttgcaagttggtccacagcatctccggggctttgtgggatcagggcattgcctgtgactgaggcggagcccagccctccagcgtctgcctccaggagctgcaagaagtccatattgttccttatcacctgccaacaggaagcgaaaggggatggagtgagcccatggtgacctcgggaatggcaattttttgggcggcccctggacgaaggtctgaatcccgactctgataccttctggctgtgctacctgagccaagtcgcctcccctctctgggctagagtttccttatccagacagtggggaaggcatgacacacctgggggaaattggcgatgtcacccgtgtacggtacgcagcccagagcagaccctcaataaacgtcagcttccttccttctgcggccagagccgaggcgggcgggggtgagaacatcaatcgtcagcgacagcctgggcacccgcggggccgtcccgcctgcagagggccactcgggggggtttccaggcttaaaatcagtccgtttcgtctcttggaaacagctccccaccaaccaagatttctttttctaacttctgctactaagtttttaaaaattccctttatgcacccaagagatatttattaaacaccaattacgtagcaggccatggctcatgggacccaccccccgtggcactcatggagggggctgcaggttggaactatgcagtgtgctccggccacacatcctgctgggccccctaccctgccccaattcaatcctgccaataaatcctgtcttatttgttcatcctggagaattgaagggaggtcaagttgtttgtcaatgatttgtcagagaacctgttgaaatgtgaattaagaagctaagaaaatatttcttagcaacattttctttttcttttttttttttttcttttgagacagagtctcactctcgtcgcccaggctggaatgcagtggtgcgatctcggctctctgcaacctctgtctcccgggttcaagcgatttcctgcgtcagccccagagtagctggaattacaggcacacaccaccacgcctggctaatttttgtatttttagtagagctggggccaccctggcccggccccgtcttcctccccaaaggtcagactgcaggctgcagggctgtgctggaggagccagctctagctcacccatgcttttgcaacagggtcgggttggaagtcagcacaggtcagtcctgcggaaggttccttcgtgactcatctgtgaagtggggtggttgggagaggtagctgagagaatgcatgagagtcctcggtgcctggcaggaggctggaaggttctagaacactgatggttataagagtgggactgtgagcctgggatcggggggtgtgagacttggatgggagcacaagagtggaaacacagcttctgcacggagcaggcgcagccctcaacaccccgtgcacctgcaccctagggactcttgggtccagatgtgctgtggttttcacaccttcttgggggcaacaggttccaggagccacctgtgggtgccacctgagccacaggctcccaggaaagcagcacagctctcctgcacccagagcttgctgggtggcggaggggaacacagatggttggggaaggcctgaggccagattgggggactctggactggggcagatgaggctcctcagaatcccacctttgaagggaactcagcttataaacacagaggagcaaagttggagggccgggcgtagtggctcacacctgtgatctcagcactttgggaggccaaggaaggtggatcacttgaggccaggagttcgagaccagcctgggcaacatagcaaggccccatctctacaaaaattattattttttaaaaaaattagccaggtgtggtggtgcttgcctatagtcccagctactcgggaggctaaggtgggaggatcgctggagcccaggaatttgaggctgcagtgagctgtgattacaccgttgcactccagcctgggtcacagatcaagaccctgtctcttaaaaataaaagttggagacaagagctggctcacctgaaaggagggattagtaggtaggagggtggatggaggatggatggatgtgtgggtggataggaagatggtattaagttggtgcaaaagtctttgatattactcttaatggctttaataaaaagcttgaaggaagaatgattggttggatagacagagataaatgcatactggaaacaaagataaagataaaacacaagttataccaggccagcaactctattttgttcactgcctttagtcccagcctggcacatagtaggcactcaataaagcctgatttgtagcaaaaaaaaaaaaaaaaa

SEQ ID NO: 6753 - DNA, 770 bp, Homo Sapiens
  NM_181270
cgagagccgggtgcacgcgccggggaggtagccaacagccgttgggacgcgacgctggttcccaggggagagccagccgctgccgcggcactggttcagacggccaggccctagggacccaccatggatcctgaacacgccaaacctgagtcatccgaggcaccttcagggaacttgaaacaaccggagactgccgcagccctgagtcttatcttaggagcattagcttgtttcatcatcacccaagccaatgagtcatttataacaatcacaagtctggaaatctgcattgtcgttttttttattctaatatatgtgctaacccttcaccacttgctgacctatttacattggcccttacttgatcttaccaacagtatcattacagctgtgttcctttcagtagttgccatcttggccatgcaagaaaagaaaagaaggcatttactctatgtcggggggcggtaatcgtgtgttgcatcgatgcgtttgtggtcaccacgaagatgaggaccaacttgaaaagattcctgggagtcgaagttgaaaggaagctttcccccgccaaggacgcctaccccgaaaccggccccgacgccccgcagaggcccgcctgaagccagcccggcgccctagcagatgcacgtgtctgtcgaatcgctgcctccgagcccacccccgagctcgcatgctgtcacccattccagcctaaatgtgaccataaaattagggctgctgcttttatcgagaaaaaaaaaaaaaaaaaaaaa

SEQ ID NO: 6754 - DNA, 474 bp, Homo Sapiens
  NM_181289
cgagagccgggtgcacgcgccggggaggtagccaacagccgttgggacgcgacgctggttcccaggggagagccagccgctgccgcggcactggttcagacggccaggccctagggacccaccatggatcctgaacacgccaaacctgagtcatccgaggcaccttcagggaacttgaaacaaccggagactgccgcagccctggcaagtagcggcagcgtagtgagttctgtacccaaggcacagcgcaacatctcagcgaagaccgcaccccggaagcaccccgaaaccggccccgacgccccgcagaggcccgcctgaagccagcccggcgccctagcagatgcacgtgtctgtcgaatcgctgcctccgagcccacccccgagctcgcatgctgtcacccattccagcctaaatgtgaccataaaattagggctgctgcttttatcgagaaaaaaaaaaaaaaaaaaaaa

SEQ ID NO: 6755 - DNA, 1131 bp, Homo Sapiens
  NM_181306
ttccggctaccccggctactcctgctcagcatggctgctttagggactgttctcttcagtgagtggcaggtgtccggaggctgcactgcagcgtagccgcttgggcgggcggccagtggcgactacagcagggactggctgccaacccctccggctacgggccccttaccgagctcccagactggtcatatgcggatggccgccctgctcccccaatgaaaggccagcttcgaagaaaagctgaaagggagacgtttgcaagacgagttgtactgctgtcacaggaaatggacgctggattacaagcatggcagctcaggcagcagaagttgcaggaagaacaaaggaagcaggaaaatgctcttaaacccaaaggggcttcactgaagagcccacttccaagtcaataaaaagcaactcctgcctcccttcctcaccctgtctctggatttcttttctatcacctagatgcttcatccagccagaagatagccttcacgttccccatctgtcttcagagaaaaagagctgggacaccaagaacaagctgttagatcactgcctgggaggcttggcttagtactctcatctctggttccattccagttcagctaagtcttgctttaaaatttttacctcctagctgggtgcggtggctcacgcctgtaatcccagcactttgggaggctgaggcgggcagatcacaagatcaggagttcgagaccagcctggccaacccagcctggtcaacatggtgaaaccctgtccctactaaagatacaaacaattagccgggcgtggtggggtgcgcttgtaatcccagctactcaggaggctgaggcaggagaatcgcttaaactcgggaggtagaggttgcagtgagccaaggtcacaccattgcactccaacctgggcgacagggcgagactccgtctcaaaaaaaaaaaaaaatttacctcctttgcaggccataggactagcccaactatgagaaatagctgttctgtgaacgtgaaaaggggacagcagttttcccagttttggccaggcagtcaagcctttaacagctcatgcacagtttaggccatgtacagctggcatctaataaatgttttcatgaaaaagaaaaaa

SEQ ID NO: 6756 - DNA, 1934 bp, Homo Sapiens
  NM_181314
tttccggcggttgcaccgggccggggtgccagcgcccgccttcccgtttcctcccgttccgcagcgcgcccacggcctgtgaccccggcgaccgctccccagtgacgagagagcggggccgggcgctgctccggcctgacctgcgaagggacctcggtccagtcccctgttgcgccgcgcccccgtccgtccgtgcgcgggccagtcaggggccagtgtctcgagcggtcgaggtcgcagacctagaggcgccccacaggccggcccggggcgctgggagcgccggccgcgggccgggtggggatgcctctgcacgtgaagtggccgttccccgcggtgccgccgctcacctggaccctggccagcagcgtcgtcatgggcttggtgggcacctacagctgcttctggaccaagtacatgaaccacctgaccgtgcacaacagggaggtgctgtacgagctcatcgagaagcgaggcccggccacgcccctcatcaccgtgtccaatcaccagtcctgcatggacgaccctcatctctgggggatcctgaaactccgccacatctggaacctgaagttgatgcgttggtgaggaggaatgggcccctcgaagtgggccgggccggccccacctgcctctgcccagatttgccctcctcctgctctgcccaggaggtggcgtccagcagtccaggacccctgcagctgcagacatctgcttcaccaaggagctacactcccacttcttcagcttgggcaagtgtgtgcctgtgtgccgaggagatggcgtctaccagaaggggatggacttcattttggagaagctcaaccatggggactgggtgcatatcttcccagaagggaaagtgaacatgagttccgaattcctgcgtttcaagtggggaatcgggcgcctgattgctgagtgtcatctcaaccccatcatcctgcccctgtggcatgtcggaatgaatgacgtccttcctaacagtccgccctacttcccccgctttggacagaaaatcactgtgctgatcgggaagcccttcagtgccctgcctgtactcgagcggctccgggcggagaacaagtcggctgtggagatgcggaaagccctgacggacttcattcaagaggaattccagcatctgaagactcaggcagagcagctccacaaccacctccagcctgggagataggccttgcttgctgccttctggattcttggcccgcacagagctggggctgagggatggactgatgcttttagctcaaacgtggcttttagacagatttgttcatagaccctctcaagtgccctctccgagctggtaggcattccagctcctccgtgcttcctcagttacacaaaggacctcagctgcttctcccacttggccaagcagggaggaagaagcttaggcagggctctctttccttcttgccttcagatgttctctcccaggggctggcttcaggagggagcatagaaggcaggtgagcaaccagttggctaggggagcagggggcccaccagagctgtggagaggggaccctaagactcctcggcctggctcctacccaccgcccttgccgaaccaggagctgctcactacctcctcagggatggccgttggccacgtcttccttctgcctgagcttcccccccaccacaggccctttcctcaggcaaggtctggcctcaggtgggccgcaggcgggaaaagcagcccttggccagaagtcaagcccagccacgtggagcctagagtgagggcctgaggtctggctgcttgcccccatgctggcgccaacaacttctccatcctttctgcctctcaacatcacttgaatcctagggcctgggttttcatgtttttgaaacagaaccataaagcatatgtgttggcttgttgtaaaaaaaaaaaaaaaaaa

SEQ ID NO: 6757 - DNA, 1234 bp, Homo Sapiens
  NM_181353
attccacgttcttaactgttccattttccgtatctgcttcgggcttccacctcatttttttcgctttgcccattctgtttcagccagtcgccaagaatcatgaaagtcgccagtggcagcaccgccaccgccgccgcgggccccagctgcgcgctgaaggccggcaagacagcgagcggtgcgggcgaggtggtgcgctgtctgtctgagcagagcgtggccatctcgcgctgcgccgggggcgccggggcgcgcctgcctgccctgctggacgagcagcaggtaaacgtgctgctctacgacatgaacggctgttactcacgcctcaaggagctggtgcccaccctgccccagaaccgcaaggtgagcaaggtggagattctccagcacgtcatcgactacatcagggaccttcagttggagctgaactcggaatccgaagttggaacccccgggggccgagggctgccggtccgggctccgctcagcaccctcaacggcgagatcagcgccctgacggccgaggtgagatccagatccgaccactagatcatccttataccgacggggaaacggaggccagagagggcgtgggcgcttgcaccacttccgtcccatccttgcgggtacctggctatgcgggggtgcctaaggagcctggaaaaagcgctcccccgtcgtgcttcctggggaagggggcgttcgctgcgctcggagcggcgtcccttccaacccgccggtctcatttcttctcgttttcacaggcggcatgcgttcctgcggacgatcgcatcttgtgtcgctgaagcgcctcccccagggaccggcggaccccagccatccagggggcaagaggaattacgtgctctgtgggtctcccccaacgcgcctcgccggatctgagggagaacaagaccgatcggcggccactgcgcccttaactgcatccagcctggggctgaggctgaggcactggcgaggagagggcgctcctctctgcacacctactagtcaccagagactttagggggtgggattccactcgtgtgtttctattttttgaaaagcagacattttaaaaaatggtcacgtttggtgcttctcagatttctgaggaaattgctttgtattgtatattacaatgatcaccgactgaaaatattgttttacaatagttctgtggggctgtttttttgttattaaacaaataatttagatggtgaaaaaaaaaaaa

SEQ ID NO: 6758 - DNA, 2500 bp, Homo Sapiens
  NM_181356
cacagccgagtcaccttttccctttctacactccacactctcagtcccccaccccgcccctttccaagcgtgtcccgggccgcagcagcagaaaccgcaccatctccacccccacattctcctcgcgggaagcgcagcagtgcctccaagggttcttaaagcagagatgaataatacggcagctagtccaatgtctactgcaacttcaagtagtggaaggagtacagggaagtctataagctttgcaacagaattacagagtatgataaactgcttatcaataacagctgtagcactgtggcttttctccatggactcatggtggtctttggaacaacgttcttcaactttgacagcttcatagggaaaacagattctatagaaataattggaaaatcagtttttccctattgttatcacaatatccttccactgctgaatgattctggcaggtattctttaggtgatgctagaaggcctcttcatgaaacagcagttttggtagaagatgtggtacacactcagttaattaatctgttacagcaagctgctgaagtttctcagctgcggggagcaagggtaatcactcctgaagatcttctgtttttgatgcgcaaagataagaaaaaacttagaagactgctaaaatacatgtttatccgagactacaaatcaaagattgtcaaaggcatcgatgaggatgatcttctcgaagacaaattgagtggcagcaataatgcgaacaaaagacaaaagattgctcaggacttcctcaactctattgaccagacaggagaacttttagcaatgtttgaagatgacgaaattgatgaagttaaacaagaaagaatggagagagcagaaagacaaactcgaattatggattcagctcaatatgcagaattctgtgaaagtcgacaattaagtttctccaaaaaagcttccaaatttcgagactggttggactgcagcagtatggagataaaacccaatgttgtcgcaatggaaatcttagcatatttagcgtatgaaactgtggcacagttagtggatctggctcttcttgtgaggcaagacatggtaaccaaggcaggggaccccttcagccatgccatttctgcaaccttcattcagtatcacaactctgctgagagcactgcagcctgtggtgttgaggctcacagcgatgccatccagccctgccacatcagagaggccattcgacgctacagccacaggattggcccactttccccattcacaaatgcctaccgcaggaatgggatggcttttctagcctgctgatgtgacaactgtgatgtgcctgcaacaacaggaaaggcaatgttatattaaggtgatttcttgtgaacaaaataaaatacaaatttacctttcttttatctgagggagtgggctggtctgttgtgactttcaacttgctgactcctcctcttttccagcccctcaaccatcggtcttgtttactagatgggctgttcagctaattaatggcaggatgtttaggatagtctgtaggtggacaagaatgcagatcacacagttttgaaattttaatttgagtatatttactgccctcagctcacataccttaaaagcagtggttgcccccgtccagcgttttgtctgcattttatttgatatattttataatccaggtttggaacaaggaaacaaaattaaaaggacagtgagttttcgccttcccttacaccaccaactttactttccaacatttgttgacatgtattttagtgacagctatccattttataaacttacagtaatcaaagatctaacagacctgataaatcacctgttcccacctcctttccccttcactccacttatagtatgtgtcattttcaatgcctgcttcccaacttcctgccatctgcctttcatgtgtgtttttcctcacacagaacctcttcctccatcttcatttccctccttttcctgttcctccaatccccagatccaccactcctgcacatgccatacacatttagaagccaagtattcagaatcagtagaaggggagcagagtgatttcttgcttcctcccttcaaagcactaccacacctagactggaaatgtgggctgggtaatttcttgctgttagcagccgagctacccttctggcatctatactttctccagtaaatgaggaaccgtaactctttggaacaaaccaaaatatagcagatgtaattgtacagttcctgattaaacttcagttgcaaaaaagaaagttatttctttaattctgtgggagttttgtataattttacttttatggtttttacacatacttgaaacactctttctaaagaattaataaaaacagaaatgagaaacatgaaaaaaaaaaaaaaaaaaaaaaaaaaaaaaaaaaaaaaaaaaaaaaaaaaaaaaaaaaaaaaaaaaaaaaaaaaaaaaaaaaaaaaaaaaaaaaaaaaaaaaaaaaaaaaaaaa

SEQ ID NO: 6759 - DNA, 700 bp, Homo Sapiens
  NM_181454
cgcagcgcctgccagtgacgtcgtgggctgcagcgcagcagcacccaacgcatctagcaggaaaggagagggagctttccccgaagaccctcctggaccagccccaggctcctgtgctggcggttctgagaagtccaagggttgctgggagaggttggttgcacgccagggcctgtactgaccacctccacgtgccactggggctgtaaggaggaatggcggccgtgggcagcctgcttggccggctgaggcagagcaccgtgaaggccaccggacctgcactccgccgcctgcacacatcctcctggcgagctgacagcagcagggcctcactcactcgtgtgcaccgccaggcttatgcacgactctaccccgtgctgctggtgaagcaggatggctccaccatccacatccgctacagggagccacggcgcatgctggcgatgcccatagatctggacaccctgtctcctgaggagcgccgggccaggctgcggaagcgtgaggctcagctccagtcgaggaaggagtacgagcaggagctcagtgatgacttgcatgtggagcgctaccgacagttctggaccaggaccaagaagtgaccgtggctccagccaccccgggacattgctaagatgggagggctgttcttaaatcactcgttcttgaagctgccacctggaaaaaaaaaaaaaaaaaa

SEQ ID NO: 6760 - DNA, 882 bp, Homo Sapiens
  NM_181462
cgcagcgcctgccagtgacgtcgtgggctgcagcgcagcagcacccaacgcagtgagtaccttgatctcctgcgtggcctcgtccctggtcttagttccaccgggcagcgggagtcaggaccgcctgtcctcagacccctccgcagcgactgtggcggccgcagtctagcaggaaaggagagggagctttccccgaagaccctcctggaccagccccaggctcctgtgctggttgcacgccagggcctgtactgaccacctccacgtgccactggggctgtaaggaggaatggcggccgtgggcagcctgcttggcctggcagcctcttcctggctagggggccagaacgcctctgaccacagcctgtggctcctgaggaagccccgaggctcatcctgccccggcacgggtcaccagctctgccggctgaggcagagcaccgtgaaggccaccggacctgcactccgccgcctgcacacatcctcctggcgagctgacagcagcagggcctcactcactcgtgtgcaccgccaggcttatgcacgactctaccccgtgctgctggtgaagcaggatggctccaccatccacatccgctacagggagccacggcgcatgctggcgatgcccatagatctggacaccctgtctcctgaggagcgccgggccaggctgcggaagcgtgaggctcagctccagtcgaggaaggagtacgagcaggagctcagtgatgacttgcatgtggagcgctaccgacagttctggaccaggaccaagaagtgaccgtggctccagccaccccgggacattgctaagatgggagggctgttcttaaatcactcgttcttgaagctgccacctggaaaaaaaaaaaaaaaaaa

SEQ ID NO: 6761 - DNA, 774 bp, Homo Sapiens
  NM_181463
cgcagcgcctgccagtgacgtcgtgggctgcagcgcagcagcacccaacgcagtgagtaccttgatctcctgcgtggcctcgtccctggtcttagttccaccgggcagcgggagtcaggaccgcctgtcctcagacccctccgcagcgactgtggcggccgcagtctagcaggaaaggagagggagctttccccgaagaccctcctggaccagccccaggctcctgtgctggttgcacgccagggcctgtactgaccacctccacgtgccactggggctgtaaggaggaatggcggccgtgggcagcctgcttggccggctgaggcagagcaccgtgaaggccaccggacctgcactccgccgcctgcacacatcctcctggcgagctgacagcagcagggcctcactcactcgtgtgcaccgccaggcttatgcacgactctaccccgtgctgctggtgaagcaggatggctccaccatccacatccgctacagggagccacggcgcatgctggcgatgcccatagatctggacaccctgtctcctgaggagcgccgggccaggctgcggaagcgtgaggctcagctccagtcgaggaaggagtacgagcaggagctcagtgatgacttgcatgtggagcgctaccgacagttctggaccaggaccaagaagtgaccgtggctccagccaccccgggacattgctaagatgggagggctgttcttaaatcactcgttcttgaagctgccacctggaaaaaaaaaaaaaaaaaa

SEQ ID NO: 6762 - DNA, 7279 bp, Homo Sapiens
  NM_181492
gggcctctgattcatctttattccctccatcatctagacttgattttatttgtaccaaggagatgcgtgtctaatgtttttctttcttctatttctaggagggctgttggcctgctgctgtgctgctgaacagtatgcagtcctttcgggagcaaagcagttaccacggaaaccagcaaagctacccacaggaggtacacggctcatcccggctagaagagttcagccctcgtcaggcccagatgttccagaattttggaggtacaggtggcagtagtggcagcagtggcagtggcagtggtggtggacgacgaggagcagcagctgctgcggcagcgatggctagcgagacctctggccatcaaggttaccagggtttcaggaaagaggctggagatttttactacatggcaggcaacaaagaccccgtgactacaggaaccccacagcctcctcagcgaaggccttctgggcctgtgcagagctatggacccccccaggggagcagctttggcaatcagtatgggagtgagggtcatgtgggccagtttcaagcacagcactctggccttggcggtgtgtcacattatcagcaggattacactgggcctttctctccagggagtgctcagtaccaacagcaggcttccagccagcagcagcagcagcaagtccagcagttgagacaacagctttaccagtcccatcagcccctgccacaggccactggccaaccagcatccagctcatcccatctacagccaatgcagcggccctcaactctgccatcctctgctgctggttaccagttaagagtgggtcagtttggccaacactatcagtcttctgcttcctcctcctcctcctcctccttcccttcaccacagcgttttagccagtctggacagagctatgatggcagttacaatgtgaatgctggatctcagtatgaaggacacaatgtgggttctaatgcacaggcttatggaacacaatccaattacagctatcagcctcaatctatgaagaattttgaacaggcaaagattccacaagggacccaacaggggcagcagcagcagcaaccgcagcaacaacaacacccttctcagcatgtgatgcagtatactaacgctgccaccaagctgcccctgcaaagccaagtggggcagtacaaccagcctgaggttcctgtgaggtcccccatgcagtttcaccagaacttcagccccatttctaacccttctccagctgcctctgtggttcagtctccaagctgtagttctaccccatctcctctcatgcagactggggagaatctccagtgtgggcaaggcagtgtgcctatgggttccagaaacagaattttacagttaatgcctcaactcagtccaaccccatcaatgatgcccagtcctaattctcatgctgcaggcttcaaagggtttggactagaaggggtaccagaaaagcgactgacagatcctgggttgagtagtttgagtgctctgagtactcaagtggccaatcttcctaacactgtccagcacatgttactttctgatgccctgactcctcagaagaagacctccaagaggccctcatcttccaagaaagcagatagctgcacaaattctgaaggctcctcacaacctgaagaacagctgaagtcccctatggcagagtcattagatggaggctgctccagcagttcagaggatcaaggcgagagagtgcggcaactaagtggccagagcaccagctctgacaccacctacaagggtggagcctctgagaaagctggctcctcaccggcacaaggtgctcagaatgaaccccccagactcaatgctagtcctgccgcaagagaagaggccacctcaccaggcgctaaggacatgccattgtcatccgacgggaacccaaaggttaatgagaagactgttggggtgattgtctcccgggaagccatgacaggtcgggtagaaaagcctggtggacaagataaaggctcccaagaggatgatcctgcagccactcaaaggccacctagcaatggtggggcaaaggaaaccagtcatgcatcacttccccagccagagcctccaggaggaggagggagcaaaggaaacaagaatggcgataacaactccaaccataatggagaaggaaatggccagagtggccactctgcagcgggccctggttttacgagcagaactgagcctagcaaatctcctggaagtctgcgctatagttacaaagatagtttcgggtcagccgtgccacgaaatgtcagtggctttcctcagtatcctacagggcaagaaaagggagatttcactggccatggggaacgaaagggtagaaatgaaaaattcccaagcctcctgcaggaagtgcttcagggttaccaccaccaccctgacaggagatattctaggagtactcaagagcatcaggggatggctggtagcctagaaggaaccacaaggcccaatgtcttggttagtcaaaccaatgaattagctagcaggggccttctgaacaaaagcattgggtctctattagaaaatccccactggggcccctgggaaaggaaatcaagcagcacagctcctgaaatgaaacagatcaatttgactgactatccaattcccagaaagtttgaaatagagcctcagtcatcagcacatgagcctgggggttccctctctgaaagaagatcagtgatctgtgatatttctccactaagacagattgtcagggacccaggggctcactcactgggacacatgagtgccgacaccagaattgggaggaatgaccgtctcaatccaactttaagtcagtcggtcattcttcctggtggtttggtgtccatggaaaccaagctgaaatcccagagcgggcagataaaagaggaagactttgaacagtctaaatctcaagctagtttcaacaacaagaaatctggagaccactgccatcctcctagcatcaagcatgagtcttaccgcggcaatgccagccctggagcagcaacccatgattccctttcagactatggcccgcaagacagcagacccacgccaatgcggcgggtccctggcagagttggtggtcgggagggcatgaggggtcggtccccttctcaatatcatgactttgcagaaaaattgaaaatgtctcctgggcggagcagaggcccagggggagaccctcatcacatgaatccacacatgaccttttcagagagggctaaccggagttctttacacactcccttttctcccaactcagaaaccctggcctctgcttatcatgcaaatactcgggctcatgcttatggggaccctaacgcaggtttgaattctcagctgcattataagagacagatgtaccaacagcaaccagaggagtataaagactggagcagcggttctgctcagggagtaattgctgcagcacagcacaggcaggaggggccacggaagagtccaaggcagcagcagtttcttgacagagtacggagccctctgaaaaatgacaaagatggtatgatgtatggcccaccagtggggacttaccatgaccccagtgcccaggaggctgggcgctgcctaatgtctagtgatggtctgcctaacaagggcatggaattaaagcatggctcccagaagttacaagaatcctgttgggatctttctcggcaaacttctccagccaaaagcagcggtcctccaggaatgtccagtcaaaaaaggtatgggccgccccatgagactgatggacatggactagctgaggctacacagtcatccaaacctggtagtgttatgctgagacttccaggccaggaggatcattcttctcaaaaccccttaatcatgaggaggcgtgttcgttcttttatctctcccattcccagtaagagacagtcacaagatgtaaagaacagtagcactgaagataaaggtcgcctccttcactcatcaaaagaaggcgctgataaagcattcaattcctatgcccatctttctcacagtcaggatatcaagtctatccctaagagagattcctccaaggaccttccaagtccagatagtagaaactgccctgctgttaccctcacaagccctgctaagaccaaaatactgcccccacggaaaggacggggattgaaattggaagctatagttcagaagattacatccccaaatattaggaggagcgcatcttcgaacagtgcggaggctgggggagacacggttacgcttgatgatatactgtctttgaagagtggtcctcctgaaggtgggagtgttgctgttcaggatgctgacatagagaagagaaaaggtgaggtggcttcggacctagtcagtccagcaaaccaggagttgcacgtagagaaacctcttccaaggtcttcagaagagtggcgtggcagcgtggatgacaaagtgaagacagagacacatgcagaaacagttactgccggaaaggaaccccctggtgccatgacatccacaacctcacagaagcctggtagtaaccaagggagaccagatggttccctgggtggaacagcacctttaatctttccagactcaaagaatgtacctccagtgggcatattggcccctgaggcaaaccccaaggctgaagagaaggagaacgatacagtgacgatttcaccgaagcaagagggtttccctccaaagggatatttcccatcaggaaagaagaaggggagacccattggtagtgtgaataagcaaaagaaacagcagcagccaccgcctccaccccctcagcccccacagataccagaaggttctgcagatggagagccaaagccaaaaaaacagaggcaaaggagggagagaaggaagcctggggcccagccgaggaagcgaaaaaccaaacaagcagttcccattgtggaaccccaagaacctgagatcaaactaaaatatgccacccagccactggataaaactgatgccaagaacaagtctttttacccttacatccatgtagtaaataagtgtgaacttggagccgtttgtacaatcatcaatgctgaggaagaagaacagaccaaattagtgaggggcaggaagggtcagaggtcactgacccctccacctagcagcactgaaagcaaggcgctcccggcctcgtcctttatgctgcagggacctgttgtgacagagtcttcggttatggggcacctggtttgctgtctgtgtggcaagtgggccagttaccggaacatgggtgacctctttggacctttttatccccaagattatgcagccactctcccgaagaatccacctcctaagagggccacagaaatgcagagcaaagttaaggtacggcacaaaagtgcttctaatggctccaagacggacactgaggaggaggaagagcagcagcagcagcagaaggagcagagaagcctggccgcacaccccaggtttaagcggcgccaccgctcggaagactgtggtggaggccctcggtccctgtccagggggctcccttgtaaaaaagcagccactgagggcagcagtgaaaagactgttttggactcgaagccctccgtgcccaccacttcagaaggtggccctgagctggagttacaaatccctgaactacctcttgacagcaatgaattttgggtccatgagggttgtattctctgggccaatggaatctacctggtttgtggcaggctctatggcctgcaggaagcgctggaaatagccagagagatgaaatgttcccactgccaggaggcaggcgccaccttgggctgctacaacaaaggctgctccttccgataccattacccgtgtgccattgatgcagattgtttgctacatgaggagaacttctcggtgaggtgccctaagcacaaggtgagactgtggagatgagaaggtggtggacactcgtgatggaatggaaatcgtcctaccgtgcagccacaccctgccctgccccgccccgccccgcccgcgtgcctgcccatgccagcacttccttaagttctcacatcacactcaaaccagtgacaccacaggaaagaaagacccaagacgttggaatggctgtttccatggacacaatctccatagtgacaatgtggggggaggggggaggggtgggatgatggggaaagggtggggggaattaaaagggagggataaatatatatatataaatctatttttagtctggaaagactttgtttaaatgaaaggtgcgctatcccttttgattctgttttaaaattatctcgttaaagatctccaaatttgttccgatgacaagtgaaatttaaatgtgagattgaactgaacaaaccctcatctcatgaaggacggggtgtgtgtgtggcgttgatctttagcctgtctcacaccagttcagaaaacactagacccaggattgaaaaagcaaaccacagcagaaccatccttttgtcattaatttgtctcaaagtgggaaggttttgggggagggggaaatacagggatggtccatgttttcaagagtaggggaatgatgtttaaacacaaaaataaattttttttcatttccagaaacactatttatttatggttttttttttttaattttttctttttgggggtgaaattggcagatgcctgaggtcatagctgtgtcctgggtcactgtggctggtgaggacctcaaggaccccatcaagtgtacacagcagcagcaaaatcaagggatgaccctcctctggggccccctgtcctcagcacattccaggcagctgtgccctgacccacagggacccgtggggatgggaggaggtccaggcctgtgttgccagagctggcagtgtgagctgtaggcagggacggggagggactgtcgctgtgatcagagtgggttaagctgaccaggaacacccatttaacccctttttctttttgctttcatttttataaaggaaaagaggacctgtcagataggcagccccatgctacgtgattctttatgttgtgttgttttgttttgtaaattgtataatttttaaatatctgagttttaaaaaaagaaaaaagtacaaaaaaatcttgttatggccttaagaaggggttagtgcatctttcaggggtcactctgccatggggataaaatagctgtttcacaaacagttttatttaaaaaaacaaaaaacaaaaaaaatcaaaaaatcaaaaaaataataaacttcattttaaccttg

SEQ ID NO: 6763 - DNA, 1427 bp, Homo Sapiens
  NM_181503
agtcacagcaccagctcttttataaagagggagacccgctccttctttaacagcagattcgtcaaaatacgtccaaggcaaggaaacctagaaaggcgtctgggcaggggaaagtcgatgcgagggcgggccagggacctttcgtcgcgtccccaccttggcatttcccgtggcgtgagcggccccggcatccgtgtcgaaagtgcggcggcggaacaggcgcgcaggagaggagcggcgcaggcgcagacgcgcgggcgggaagatggcggctgggttcaaaaccgtggaacctctggagtattacaggagatttctgaaagagaactgccgtcctgatggaagagaacttggtgaattcagaaccacaactgtcaacatcggttcaattagtaccgcagatggttctgctttagtgaagttgggaaatactacagtaatctgtggagttaaagcagaatttgcagcaccatcaacagatgcccctgataaaggatacgttgttcctaatgtggatctaccacccctgtgttcatcgagattccggtctggacctcctggagaagaggcccaagtggctagccagttcattgcagatgtcattgaaaattcacagataattcagaaagaggacttatgcatttctccaggaaagcttgtctgggttctatactgtgatctcatttgcctcgactacgatggaaacattttggatgcctgcacatttgctttgctagcggctttaaaaaatgtacagttgcctgaagttactataaatgaagaaactgctttagcagaagttaatttaaagaagaaaagttatttgaatattagaactcatccagttgcaacttcctttgctgtgtttgatgacactttgcttatagttgaccctactggagaggaggaacatctggcaacaggaaccttaacaatagtaatggatgaggaaggcaaactctgttgtcttcacaaaccaggtggaagtgggctaactggagctaaacttcaggactgtatgagccgagcagttacaagacacaaagaagttaaaaaactgatggatgaagtaattaagagtatgaaacccaaataaacagccaccacattttcaaaacagatttgtaaaaattgtatttgttaacactgtgcacaaacgttttatactaaataaatatcaaactacattcttctgaaagatgtttctattatttcttaggtcacttccatatatattatgtatagtgaaaccatttttaaaaagcaatgacttaggcaaaccaaccctagtttgttaaaccatttccctgtttttatttaaaaatgataaggttgtgcttctgtataaagtttgtacatctagcaatgtaaaatactgacacattaaaaaaaacaaaaagtagaaactcaaaaaaaaaaaaaaaaaa

SEQ ID NO: 6764 - DNA, 8133 bp, Homo Sapiens
  NM_181521
agcggaccgagccgcagccgcagccgggcggcgggcgagaggcggcggcggcgggcgggccgcgggcagtcagtcgggcggcggcggcggcggcggcggcggcgatgcggcggccccgctgagtccgcccgctcctggcgccgggagccagccgcgcgaggcggcccgggccgggcggcagcatgcggagcggcgaggagctggacggcttcgagggcgaggcctcgagcacctccatgatctcgggcgccagcagcccgtaccagcccaccaccgagccggtgagccagcgccgcgggctggccggcctgcgctgcgaccccgactacctgcgcggcgcgctcggccgcctcaaggtcgcccaagtgatcttggccctgattgcattcatctgcatagagaccatcatggcatgctccccgtgtgaaggcctctacttttttgagtttgtgagctgcagtgcgtttgtggtgactggcgtcttgctgattatgttcagtctcaacctgcacatgaggatcccccagatcaactggaatctgacagatttggtcaacactggactcagcgctttccttttctttattgcttcaatcgtactggctgctttaaaccatagagccggagcagaaattgctgccgtgatatttggcttcttggcgactgcggcatatgcagtgaacacattcctggcagtgcagaaatggagagtcagcgtccgccagcagagcaccaatgactacatccgagcccgcacggagtccagggatgtggacagtcgccctgagatccagcgcctggacacgtgaggacctgcctggatcctcctccctcccgtcctcgtgcctgtctctcagtcaagttttctttcccttgtcctgtcagatttccatgtgattcagttgaattttgtcctctttggtaaaagttcattttgggaaagggtttcccgagtggcccagtgggcgggtccgcggtggagttgggaggcccacgttcctcagcgtttggggctgtggagcagccggcgtcactgcccaggtccacttgaggtcttacctgccctgaagcacaggcttcctttgactctgagccaccttgtcgtgtgtatttgtaacaagactttggattaaatggggctgctaagaggggggaaatatgaaggaatgaagggacagcattggaacggtcagtcggcagtggttctcaggcagccttaggcaccacctgctccaagtcagtgttgagtctgcgtgctgggatccagcccactcctcatcttccatgccagggcccccaggcagccagcaccagcccaaaggccacagggctggggaaagctgatgtcctgttaggatggctcccagggacctctgactcaaggaagggtgaccttttgtttcctactctgctgagaaatcacttgattcttcctcaaatgaatcaccttcctgaaccccagattcttctccaggaatatgggggccatcttgttatggggactatcttgttttccagtttcctgcctaccctaaatactttgaggctgaattgcagattttcagtcattttaccttctcaggtaaaagccatgaaagaaacaagcctactccaccagccaaagcacttgcccatttgctggcttcatgaaccgcaggtgggaggtgtttgtgttaaaaaacagcatgcacacgcgtgcgcgcacacatgcacacacacacccctctattttagggatgtgtgctaattttctaaatgcctgcaaagagttctaaaatgattctgagcagattcgtctaggatttgaaaatacttgaatttgcaccagaacacacccttccacccatgtttcagaaggcactaattgtcgctttgggcgcctcagtgtcataactgtagacatcattcttgggagttgttggggggaaaaatcctagctacttaaggtttctgattgattcttgataaagtgaagattattgtgtgtggtgaatgagttcagtgagtccccatgatgcagtagtttttttaaaaaattagagagtaattatatcttttatggaaaaaagttgttttagtttgtcaggttttccctctttgaactgtttttaatgtttacaaacctcactttagctctaacattttgtgtttagccctcaccaaaaagcacttactgtggcaggaagattttgcagtaacatggagaaatccccaagatcaagtgctgacaaatgttgacagctttagcagcgtactgtgtaataaataactccgagggggcggcggggggtctgtgcaagaaagcgtcaccttatggacatgtggcgtctcattccccagaaaaggacagcatctgagctcacagtgttgatcaggcaacactgctgggctgggggtcggagttggggttagcttcctgcaccaacaccttcagtacgatctgagttgggagcagtgtcccaggctatgtggctgagcaccacgtctgcctcaggggctgaccctgctagcctgttaacaactcgtctcccctctgctcccacagagagggcagccaggccagctcacagctgggtgtgctgcctgtcaggtctgttgagtgtgtttgcaaagtcaaaattgggcttatctctctttgagagttccttttaaaatagggccacaaaggctcagccttgcattaaatggggcccacttggaaggaccatcctgagctttatcagaaatctcctgctgggaatcatgttacttggcccccaaaaaaggccatctttgaagtgagattgaaaacaagaacaccattcaggtgggcttgttgcccaagttttcccagctcacttcagtaaaaccacttgatcatctggtgaaagaggggggcaggtggttggcctcctgaggatatgttgtcagctgcaagaaatagttctgaagtcactgaaactaaatgcagatgaatgaccaaaaaggatgacacgccagagagtgacttaggagttaatttgcatcttcgtgatagactcttcagaattatttatgtccctgtaactatttaatatcctttgtgccgtgaggctcctcggtggttttgtaaatgttctccttgtatttaattaactcccactagaaccggaagtggtgctatggacgctttctagttgatgtaatgtgtggttgcacatgtcatcatgtatagaccacgtggtgacgaaagttctggagggaatagggttatccaaggtgaatatgaagacgcctatatttttcttatattgcctctatatgcaaacagaagacaatcgatatctgggggccttaaaatgacctcttggcaaattgaaggaagcgtttttgcgtttaatagtttcaatagggaccaatatcagtttggtttggggcatttgaaggctgagcgaccttagtttttctcagtgttctggtgggacgatattggttttcacatttaaagcaaaacttgaagaaactgcagttgctgtgtgcatttgggttttttcctggacactgtacagctgaaaccctcaagcatttggtggaacctctggtggttttagatggatgcaaacactgatgtcctcagagaaagtttattttggcactgattgggtggatttggtattttttccctctgattctctttgatatccttctttcacactgctgaaggcatgggagggaaatatgttttccctgccttaaagagggattacagtcatgaaaggctggagatacttgttggccccacataaagctgggaagaacagatgcagtttcagattaaaatctcgtcagagaagtttgatttgaagtaaacagccatccgagggaggtgacttttgtctacagaaaaagcaagaatgtggcagcctgcacagccccaatacacatcttccttggcaatgtgagctgaagccagcatgggcaagtccggcccagctctgagcgcttggccctgggaagccagcggcacccccagcccttcgggccctgttactgtcccctggcaggaaggctcacgcctgtgggcagccagggaatgtgtctgacctccaccctatgtcgggtgcttctgggacagcttcgtgactcagttgaaaacattctgactctcttcaagtttgcagttacatctgtggttcttggaagctgtcctagtgagtcagccttgggttaagcctgaggagaccaagctccaacacctttgtgcactcatgtacgtgaattcttgcttgcagtgaatgagacctgaacaaccctagtgggtgccatgtcctgcgtgtggcccaggcgtaccttttcttgtagattcacatgagaaacccgtcacctatccatgtgctctgagaggtggactgaggtctaatccctttctgtgccagattttctgtgggttggtcttagcacctaggagatgaatagagcatggagacacctgaacaatttagtgattctgcaaggcagtgatgatttaagggttcctattgtctcatctgtgttcaaaacaaaacagtcatgaagtctttgtgccactgcctgactgtcatcttctccagatcttgtttacagagtaataatgacgttaaacaggtatcagaaaggggaaaaagtttctaggccaagagctgctggtggattctcttgagcagaataacaagttgcttcctgctccagggactgccattagcttgtgaagtctctaggtgccttgttatttcctagtgaagttgcagaatccagggttttttccaggtttgtcttattttatcagcacccacgtccaggcccaacagcttggtaggctggtgaggtccacacacggccaggtctgggagataagggaggaagcagtggcctggaacaccccacctgtctgctatcagcactagacagctcaggctgtcttggaaacgtgtactttgttaactgccttcctgtcctcttgtctttgaaagctgtctcgcgttccacagtcagcttgagggcaagagtgggatgctggggacaggtctttcccgtcctgtgggtgagctcctggcatctggctcaggaacatgtgggtccagcaggtgactctgaagctggcttggctgccatctcagacaggacgcaggcctgacaccctcagcttttagctttgtaaacttccctggcgctttgtagaatcttgtgtttcttctcttctcagcagatatcattcaagtcacaagaactgtctggttgagaaagtaatttaaaatatttgaccttttatgtttcttttatttagaaactgtgagagaaaataccgtcaatatctgttaggtctagaaaaattttcttccgaaagtgaatgttctgtttaattcttcttcatgcaagtgagtggcattttgtacactctttagcttgaagcggagtgggtcctattgtattttcccttcttttgtctggaatatattctttttccatttggatacagtttttcaacctttgggatttttttttcctttctagtttttcctactccacaaacgtaacagtaaggaaaaaatcacccacaaacctgctgagtttgaatcactggcaacttgcctagaaaagttcagatgatgggtccttgaactgtgtatctatttcatagggtaagtttgttgtctatgtttgtttttttatgctgaggctttaattcaggtgacttgctatctagacacctggggtggcgtgttttctttgggatgcataatacacaaaggccagggagcctttggcttggacccccagggagctattgaaacttttaaagtttgagtttaggagtaagaacatatctcagaccaccttagtcagctttgctgatgggatttagggccaggtcagagtttcttttcataactgcctgaaaagagagatggtgtgaaacaagattctgataatggtttgtgtgagatttgatcatagtctaaaactatcacgtctgagttgccttaggatgacagtgctgacacccagtaggaagtatcccatttttatcaggaaagtcagtcacgcgtagggatggtgaggagacgcgtagggatggtgaggaggggagaggagggagacctgctggtgcccttgcaccagggtgaggcctgactcacgctgcttccccccacaggccctgctttgcttgcctgctttttccagaatcgattttgcaagcttcaagattctgttcccctcttcgcagaagtgaggaaggcaaatactcagggtttgaagggagacctggccggcctgagggctggcagatgtgagggcaggacacctgggatggactcgtaggctgacccaggcccaaagggggctgcctgttcccaactctttcactctgtaacccattttaaaatgagtttttgaatcttgcctcaaattgacctacttggataaaatcagtgcttttcctaacttgattttgtttgacgtggttccctctaagagaatggtaggaattgaaactatttgtatatgttgaaatttgtaggggttcaggaacccatggcagaaacactaaactatttatttacaagtatgactatttttttttcaaagtaggcaattctttgtatattttaaggcaaataatcacttcacctctggtgccttccatgcgtcgcataagcactcttgtcaatcatggaattggaaaaaaagatgtacatttagttaaacaagataacactatttttgtagcatgattttagattgtgtccttttaatattgttttcaacaatggtagttttgaggttttggccattttctctttacacttcgtatgtattttaaagaagaaaaaaaacaaaaaaaattccctggctattcctctttcctctctgctgctgcttctcctgcatcttgttcctgcttatttaaatagtctgagagtaagagtatatttctgtgaaataattataagtcagtataattgcatttggcattttttaaccacttgctcagtttggagccactgctcacctcaaacagtacaaagaaagtggttccatattttacaaacagaagagtagcatcagagccctgacctcctgtctttgggtgtaaaatggtgagaggccggtgtccggctccttcccctgtggtttgggctggtgaactgagcccaagtgtattctctggcctgggccccttccagaatcagtgcgagcgtcctgcagaggcatggccttcctgccactgcagagtgggaagcttcctgggggacctcagccagctccggggctctcatcttccactcggatctcagattggttcgttgtggatgctctggctaggctcggcggccttttccaggcttcaggcctgaacaaaacaggctgtttgctgtgaggagctagatgacaccaagacacagacacgtactcttcaccggctccttttgcttctccttcctgcaggacgtgagttatgtctggtcccaaaacccttgagtaaactagctgagccattgcaaatgaaggtacagatggattgaaacataaaattgtagcttttggtgtccttctgaagggtcagaatatgtaattatttgataaccaaggaagtcaagtcagatggctaagtagtaactttccaatatgatttctccgtggtacttcacctggtggcacttttggggggcaatgttaacaactatcacattttactcatcaagtctctttcatttcggcagtttaaagacacaactgtgggctttctgaggcgatgcccgttgggcaaacttaggtttatgtgtttggtttttcagctgacgtggaagccctgggtgggcgtcccctggctggcctggcttttgggttcaagtctgtatgtatggagtgggttggggccccaaagctttgctgctattgatttgtccccgacagcaggcaaagcctcacattgccctcaattttccccctttcatttgaaggaccagtttttcatggtacttgtcttgatctttttcatagtgttcaaatctgtatttttgtatgtagagggaaataattttctcaacactaatcgttaataactattgtattaaattgtcatgaaggaacttgtttaataaatggacgtgtaaggaaaaaaaaaaaaaaaaa

SEQ ID NO: 6765 - DNA, 933 bp, Homo Sapiens
  NM_181528
agtaccccgtctcgctcggttccgcggcggccacgctccgggagacttccggcagggcgggcgcggggtcttggcgaacggtcttcggaagcggcggcggcgcgatgaccacgctacgggcctttacctgcgacgacctgttccgcttcaacaacattaacttggatccacttacagaaacttatgggattcctttctacctacaatacctcgcccactggccagagtatttcattgttgcagaggcacctggtggagaattaatgggttatattatgggtaaagcagaaggctcagtagctagggaagaatggcacgggcacgtcacagctctgtctgttgccccagaatttcgacgccttggtttggctgctaaacttatggagttactagaggagatttcagaaagatatgaggaaagcactttccagggatactgagaagaaatccatcataccattacctcatcctgtgaggcctgaagacattgaataaccctgggcagtggttcttaggcagatactctagatgctttatggacaatattattttcattggatgattctggagctctattaggagaaaagtaatcattttaggtcttaaagacttcaagaaaatacaggttatcaatttattttaaatctcattgtttccagttagcaatatcatacctattaaagctgttcattgtaacaaaattcaatcaaaaaggcagctaggtcagaaggaaacataccactctcatggttcatagtattcactgtatgtatgctagggaaaagacttgctccagtctcctcctcagttctgtgcctgagaaccactgctgcatatatttgtttttaaattttgtattgaactgttaattgaagctttaaaagcatatatgaaatgtataaatctaagatgtataatacattattgactcta

SEQ ID NO: 6766 - DNA, 13760 bp, Homo Sapiens
  NM_181552
ccgcggcgccgggacagccccgggactctgccaggtggatgttgtgcgtagccggagccaggttgaagagagaactcgatgccaccgcaacggtattggcgaaccggcaggatgaaagtgagcagtccagaaagcggcttatcgaacagagccgggagttcaagaagaacactccagaggatttgcgcaagcaggtagcgccgctgctgaagagtttccaaggagagattgatgcactgagtaaaagaagcaaggaagctgaagcagctttcttgaatgtctacaaaagattgattgacgtcccagatcccgtaccagctttggatctcggacagcaactccagctcaaagtgcagcgcctgcacgatattgaaacagagaaccagaaacttagggaaactctggaagaatacaacaaggaatttgctgaagtgaaaaatcaagaggttacgataaaagcacttaaagagaaaatccgagaatatgaacagacactgaagaaccaagccgaaaccatagctcttgagaaggaacagaagttacagaatgactttgcagaaaaggagagaaagctgcaggagacacagatgtccaccacctcaaagctggaggaagctgagcataaggttcagagcctacaaacagccctggaaaaaactcgaacagaattatttgacctgaaaaccaaatacgatgaagaaactactgcaaaggccgacgagattgaaatgatcatgacggaccttgaaagggcaaaccagagggcagaggtggctcagagagaggcggagaccttaagggaacagctctcatcggccaatcactccctccagctggcctcacagatccagaaggcaccagacgtggagcaggccatagaggtgctgacccgctccagcctagaagttgagttggccgccaaggagcgggagatcgcacagctggtggaggacgtgcagagactccaggccagcctcaccaagctgcgggagaattcggccagccagatctcacagcttgagcagcagctgagcgccaaaaacagcacactcaaacaactggaagaaaaactcaaaggccaggctgactatgaagaggtgaagaaagagctgaacattctgaagtccatggagtttgcaccgtccgagggcgctgggacacaggatgcggccaagcccctggaggtgctgttgctggagaagaaccgctcgctgcagtccgagaacgccgcgctgcgcatctccaacagcgacctgagcgggtcagccaggaggaaagggaaagaccagcctgaaagtcggcgcccgggatctttgccggccccccctccttctcagttgccccgcaacccgggggagcaggcttccaatactaatggtacacaccagttctcaccagcggggttaagtcaagactttttcagctcatccctggcaagccccagcctacccctggcttctacaggaaaatttgcactaaactctcttctccagcggcagctaatgcagtccttctactccaaggctatgcaggaagccggaagcacaagcatgattttttcaacaggtccatacagcacaaactccatatcttcccaaagtccattacaacaaagcccagatgtcaatggcatggccccatcccccagccagtcagaaagtgctgggagcgtctccgagggcgaggagatggacactgcagaaatcgcccggcaggtcaaagagcagctgattaagcacaatatcggacaacgtattttcggacattatgtgttgggactgtctcaagggtccgtgagcgagattctggcccggcccaagccatggaataaactgactgttcgtggcaaggagccatttcacaagatgaaacagttcctctccgatgagcagaacatcctggccctccgtagcatccaaggcagacaaagagagaatccaggccagagcctgaacagactatttcaggaagtaccgaaacgaagaaatgggtctgaaggtaacatcaccacccggatccgagcctcggagactggctctgatgaagccatcaagtccatcctagagcaagccaagagggagctccaagtgcagaaaactgcagagccggcccagccttcctccgcatccggcagcgggaactctgatgacgccatccgctccatcctgcagcaagcccgccgggagatggaggcccagcaggctgccctcgaccctgccttaaagcaggcaccactgtcccagagtgacatcaccatcctcacccccaagcttctgtccacctcgcccatgcccaccgtgtccagctacccacctctcgccatctccctgaagaagccctccgcagctcctgaggccggtgcctctgctctgccgaaccccccggccctcaaaaaggaggcccaggacgcccccgggctggacccccagggagcagccgattgtgcacaaggggtcctgagacaggtgaaaaatgaggtgggccgcagcggtgcctggaaggaccactggtggagcgcggtgcagccggagagaagaaatgccgcctcctccgaggaggccaaggccgaagaaacgggcggcgggaaagagaagggcagcggtggcagcggaggtggcagccagcctcgggccgagcgcagtcagctccagggaccctcgtcgtcagagtactggaaggagtggcccagcgctgagtccccatactcccagagctcagagctgagtctgaccggggccagccgcagcgagacaccacagaacagccccctgccatcctccccgatcgtgcccatgtccaagcccaccaagccctcggtccccccgctgacccccgagcagtacgaggtctacatgtaccaggaggtggacaccatcgagctcacccggcaggttaaggaaaagctggccaagaacggcatctgccagagaatcttcggggagaaggtgctgggcctgtcccagggcagcgtcagcgacatgctgtcccgaccgaagccatggagcaagctgacgcagaaaggccgagaacccttcatccggatgcagctctggctgaacggcgagctaggccagggtgttctacccgtccagggccagcagcaagggccagtcctccactccgtgacatcgctccaggacccgctgcagcagggctgtgtgagctcagaaagcactccaaagacctccgccagctgcagccctgcccctgagtccccgatgagttccagtgagtcggtgaagagcctgaccgagctggtccagcagccctgtccccccatcgaggcgagcaaggacagcaagccaccagagcccagtgacccgccagcatccgactcccagcccacaaccccgctgcctctctccggacactcggccctcagcatccaagaattagtagccatgtccccggagctggacacctacggcataaccaagcgggtgaaggaggtgctgacggacaacaacctcggccagcgcttatttggggagaccatcttagggctcacccaaggctctgtctctgacctccttgcccgccccaaaccctggcataagctcagtctgaaaggacgagagcccttcgtccggatgcagctgtggctgaacgaccccaacaatgtggagaagctgatggacatgaaacggatggagaagaaagcctacatgaagcggcggcacagctcagtcagtgacagccagccctgcgaaccgccctctgtcggcaccgagtacagccagggcgccagcccccagccccagcaccagctgaagaaaccccgggtggtgctggctccggaggagaaggaggcgctgaaacgagcgtatcagcaaaagccatacccgtcaccaaaaaccatcgaagacctcgccacccagctcaacctgaaaaccagcaccgtcatcaactggttccacaactacaggtctcggatccgcagagaactgttcattgaggaaattcaggccgggagtcagggccaggcgggcgccagcgactcaccctcggcccgcagcggccgggcggcgcccagctcggagggcgacagctgcgacggcgtggaggccactgagggcccaggcagcgccgacaccgaggagcccaagtctcagggagaggccgagcgggaggaggtgccgcggccggcggagcagacggagccgccgccctcggggaccccgggcccggacgacgcccgcgacgacgaccacgagggaggccccgtggaaggcccggggcccctgcccagccccgcctccgcgaccgccaccgccgcgcccgcggcccccgaggacgccgctacctcagccgccgccgcgccgggggagggccccgcggccccgagctccgcgccgccgcccagcaacagcagcagcagcagcgccccccgcaggcccagctcgctgcagagccttttcggcctccccgaggccgcgggcgcccgggactcgcgcgacaaccccctgcgcaagaagaaggccgcgaacttgaacagcatcatccaccgcctggagaaggccgccagccgggaggaacctatcgaatgggagttctgaggggccgcggccctggggcgggcagccaggctgggccgcaagggcctggacggggtcggacggggcaggcgctgcggacaccgtggcctgggcttggcccgcggcctgcaccgaccccgggccggacctgagcccgcagcccagaccccctccacggtccgcggcctgcaccgacccgaggcccagatccaaggccgcggcccagacccactctgcggcccgggccgaccctgcggcctccaccaaccccgcggcccagacccagcccgcggcctggacccctggaccgctttgcgcacttaccgccctgcgggccacagggcaaaatcgccataggccaaggtgcatatagaaaacaaaggagcattaagcccaatctatgtcgtgttttcaaggaagaaaacggaaatgtgtggtcgagcttttttgtaccctgaagtgttttttttattgccctaagtgatttccacaggttctggaataactcttacagctttgccttgtgtcctcctgttccgtgtgggctttaaaagaaaaaaaatcaaacccacatattaaaagggggctttttatctgccatctaatggcttcagagcgataatacactattatcttcttaaaccaggaaaaaataaaagggggggtgggatttttcagaaaaattaaaaaagaaagtttttgtagctgttcagttgccactaagagattgcacagtcaaaacgactctaaacacactagtttggattcctaaatattttcaagaaaagaatcttctcgtttgaaactttgaattaaaataaaacacatttactccacatattttttaacaaaaagaaaacgtcacatcaggaaactctgattttgtggtagctgacatagtgttttcttgtacgtgaatagaatcctgacatgtagtgcacattgatgtatagctttaactgaccctgggttttgcagaccagggtttgtttaatacactccattctaggccaaatcaggacaaaaaaaagaaaaaaaaagaaaaaaaaaaaagaaaagatccgaatctaggtattttataatctgctttttaacctctaaccgcagagcacgctgatcagacctcatatcttggaggtttaggagacaagttagaactgtagcatgtacctgttaattttgtttaatttatggtgtctcaatctgtctgtgcgtctgcacgtgtgcaagcattgaaagaaaggagagagtagtccgggcgagcacagcaggcagttccagggccagacgggcccatccccaagtagatagcagtctacggatctctctctggcacagaaggcacctcacctcacaccactctcctggatacctgatgaactgagccctcccaggggaagacactccccaggcctgggcagggcttacacgcgcactctctctcttctttccctttttcttcccaccgcaagcactgatgaccctgttgaactcgtgggaaacttcctttctctgcaggagagagaacgtggcattctgggctccccactcccatccctgtagaaatggcccaaactcacaccaaaacgtggatgctcttcaacttccaaacctaccatttgcccttctttcatttcgcctcttagttctttttatgcacagttttagggcagtctaagtacaaactgaaagtctaacttgtctctgattcctcccttgtctatgtgtatatgcgtgagaatagaggcgggtgagagtgtgcgtgcgtgtgcgtgtgtgcaattttatacgtctgtgtattttcttaagtacctgtgcacacgtagagtgcattactgccacctttttcaataagctgttttatcagttacggcttctacaagtttgctaatttagacttctttattgccatatctttaaactaacaatagatgatttcggtatatatatatatttttttttgcttatttataggtgctgtattttattatctgattgttaggaagggatgaaaggggcaaatattctttagagggatagactgccggcagtattgggtataatttacaagatgtagttgtcatactgtatattactgattgaaaactttttgaccgtattgtgtatcattgaaacctttgtcttaggtcaacatctttggatgacattttaatggtgcattcattatttcttaagtttaattaatattacttttttttttatttggggggtgggagggagttataattttaaaggtatgctctggctgttccacctccgtgtgcttgttaattaacttgtaggactttgactgtaagatgtgaaaccacgtttcttgcatgatgttttagagattatttcatttacagtcttttaacctgcagctgcagcacttagttcacgttttcacaaatttcaagagtcactacactaaagacaatgccttttcatgaataagaagttttcagaaggctctagggggctgggaggcaggctgttcgtttgtcttttgttgggggtatcatttctgaacttgaaatccagttcagggagaagagaattcaaaattagaggagcttaaggggacacgggtcaacatctagctcgattcaggtgcattgagaagagtgagttcacatcggtgacccttaggacagtgagtggcagagccctgacgactgtggtgtcctctccacaaaaccctcaagggacttttgtcatcatgtgtgatgaatctttaaatatcgtctaattttcataagaatgaaaagaagttaacaggaaatagtaggctagggtttagttttaaaggcatgactgttatttacaaaggtgttaaatctgaggaaattgacaaatacagatttgtccattctagtggccaaacagtaacagtctaaaatgcagtcattttgaccctcccaagcaatttagtcatatgtgttgttttctcttttctgtttttacttcttagatttttaactaggttactgttggttcccattctgtcttttttgccagacttacatctggtgccagatacaatcagttggttaaattttgcttgcagttctgtgtattttttttcctctattatttatttttttaaaaaaaatagagatcctaaccttagatctttgatgtgaagctagcactgtctgtaatacttctaagagctgccactaaaataatacagcaatccgtggccaggggagcaccccctcctggttgggcccctcagttggagtctaagggttaatctctcatcttgctaagcagtattcaagtgccttgaacagtgtcccctcggcatggctccccttcagcaggctggcattccaagcagtggcccccgcaggcagccgacccccttcctcttcacgctctatgagtttaaaaagctgatttgtacctctcccctgggggaaacggttccatataaaacactaacacttaattacaagctccattatgccattttaaatggcttctttttgttaattggaggcattgttcataacttaaggcttttgccattaacttagctggctaagcagaggctcggggtaaaatcagtgtttgcatttagcctcttgacccggagttccggcccaagctcccttgtgatagccgagatggcaggtgtgtgagttctgtcctagacctgtgcccaactcacttccaccccagaggagtcttctgtcctcctccccaacccccgagctccctggtaacctcctcttgaacttctgtatcagtgaagacatctgtggtttctgctcaccagacctctctttagaaagggttatcagagccatggagcttagctcaattggattcttctagacgatcttaggaggcatcttggcatgaggcagcttctaagcgtctcctgggacaggattggggtgacagcccagggatgcatgcatgggagaactctctgagaaatgccaggatcgtggctcacagggacccaccatcaaaacctgctactttgtgcaagtaattgaggcaaaagataccagtcgacagcctccctggggtagatcccttgtacctccaaagtacaaatacctccctgctcagtttccttcctgtcgccatctttgttttcttcccattgaaaaaccatcctgtctgatgtggacgttcaggtctgctggttggcggtccgggcccagagtgcagcagagctctgggttaaatattcctttctggccaccgcccaagcccaggtggccagctctcataccccatctccctccttggccagggccagcatcaggcgtgcagctcatgaccagtttacacaggctgcaaagagatcgctgtgggcctcggctgactactttaagattatgccacagccaggccctaaaaagagaggggaacaggagtccccaggtgagctctctgacgggcaggtgccttcccgactaaggttggactggatgactttgttcctcctgcatgcatgtcctttgatgcaagggtgatcaatgaactctgttgacattctatgcaatgtttttcattcctctgattttagcaaagcaaatcttactgaaaaatagcagagccaggggaacagacgcatgtccttctgggagtcacacaaaagcagagagattttgaactgaggggcgacagcctttgccttaaatgcagtatgacaggcgcttcttggcagaccagtaaaaacaaaagcccatagaccttactcatcccaaggccgacaagccagctgtacagggcgagatgtagcaacacggggcatgagcggtgggcgtgctgggctatttgctgtggtactttaggctggaggtttggctcctgtgctgccggtggggggccctgtccctccccagatgtcctccctcttcttcacactcctcattgtcccttctacctcactaacctgtcttctccatctgatgtcacccagaaccacaccccacagaactgtgaggcacgtgggctggagagagcagaaaagctgccagcgcagcagacacgaacatccctctgcctggtgggccggctttgtgtgtctctccttttgtgagcgcaacacggacaaacagctgtgctctgcaaggcacacggatgtttcccttccacctgttcccaaagctccagcagctgtttcttttgcaggcagggcgtggtctcggggctccgagggtcttgtctttggtccgccttcctttctgtccagtcctgctcagctgttaagatccatcatggccattatccttgtcccggactgccccaaagttcccagctggctttggggaacactgtagctcttgggtgtctcttgtctctggcatggttttagcgtcactgcgaacactcctttgcaaacatcaaacatctcaaagacggaaaaggatagatggcttcctccagcctacacgccccgtccacagtggcatcaccctcttatcccaaaagaatatgccagttcccatccagcaccgaagaaaatcagctcctggggctggtggttggaggtgggtctgtccactgtgggggccaaagtgttcccctgctggagacagtttgcaagtaagaacctaaggatggggacagcatcctgtgcttgggcattgaccagccaaagctcacatttagaaagccctcagtgcttctgtggtttcacctgggcatcgacgacattagggaagcctttgtgaccacaagggcagggcttgtgccctgagtggcgaggtggtgacctgaggccagtgtgatgtggttggatctcagcgtgtactgaatgccagtctggccggcacactcgaacgctaagagaatggtccaatttgatgatcttatttctatttcgatcaggttttgactttttgtagatgaaaactaccagggaaaaggggaagcaggtacccaataaagtttagaaagatccagtctgtgaaacccttagagatgggctgaaagttaagtccaccaacccttgggcttaatcaggacggaagaggagggggtgtggggggcagagcgtaaaacaagccccagccctactcccggccccccagcccagtcttcccaatcccagaggccccggcggcctgtgctcctcaccaccctggtcaggggaatagaaggaaatgcaatttccgcctgtctgcccgacttccaaaaactgcctcctcctgcccaggcctctcccaccaccaccttccctccaaagataaccgtgtccatgccatccgtggcatcatctcgagttttcatttttggatgaagtgacatttagctttaacaagacatttccaaagcgcctagtctcctccaaaatgctaactttaaaagttgggcattgtaggcgaaaaatcccaaaaaaaaaaaaagacaaaaaaaaaaggctggcgagagaaagacatttggctatgcataaatgtgcacttcccccatgcccccgttcttaaactcttaagatgcctttgagttgcttttcatgaatccttttagtttacccgataatgttaagaaagcattagtctacgttactgtaatttctgtagtgtttacgctttaatttctaccacaaaatatgctatatgctatgtatcaagctttctgtaatcagaaagaaaaggtgccttatatcccaatgtcacggctacatccctatggaaattaatcagaagcacagtgtgtacggaagcattgggacttctgctggtgaaacaagagaccattcagcaagacacattgaagtggcacggagctgcttttgttttataattcttttttccccccttttccttcttcttttttattattttattattttttttgtactttgctttaaacggaaagcacttaaatagatgactatgtgtaaaagctctgtgcaattgaaatcatttttcttcattttaaaaaaataacgtattgcacaccaaatgaactcaaagtaagctttagaccaggacgattcaggttatgaatgagtttgttcactgtagttccgtttgttcatgaaccgaagggaaaacaggcctccccgactccctccagtctcccagcctgcctcttggtgaccactgtgctgggcgtgcagggcccgcgggctctggccggagccgctggcctgacgaggcaggatagggagtatccgtgattcagaagctgagacccttccccagtgtctgaggccacagccatcccttccagcacttaatcttgtcttgttgaaatggactgactgctactgacctgccggcgtgcgtgagggtgattataaaaggatgtttccttgagaaaaaaaaaattatttctatcctcttctatttattattaggttaatcatttaagtacttatcaggagtgtattgttattttgtgttttgttgtcataaatgctttttgctgtcactctagtggttactatcctctgccttcctctcctcccctactcccccagagaaccaaggcgtctgggggattgactggggggcagagggggtttccccagcaaaatcaaacacctgtctccagagtagccactcaaaaactggtggtctctatgtgtctaactttttaaatgagagtgtttatgaacaaaaaaatttaccaacgtgtgagggagttgctgagttgaagaatgctcgcttgaggagcttcagaggaatcttagcaaagccaagttcagttccccaaagcctcctagagcctctggtaagacttctgggttcatgaagtttcggcgagccgtggtcagagagggcgcggtggcctggccaagactttacctccaagcgagagagtgatttcttgcaaggcccgcatgggttgatacgttttggttggttttttgttgttgtttttcttgcgtacaaagttggtcaaaaccatctttcaaagcaacagtgttttgtagtaccaggctgtggcttgagggctcacctaggagatcataggcagagggcccctttcccctataggtggttcaacgtggaggaaggttgggtgtggagattgcttgctgtggccccaagctcagccagcaggacacccagttgttgccaatcaggtgtgaaggtgaggcgccctgccttgatcccatgggcccagcagaaggaaacttaccccaggccaaggcaagggccctgctcaccccaaggtaggctgggaagagcatctctttccatatcatcacctccccttctccaagattgccgggggccctgattttgttctctctttgaaagaaaccctccaccgaaacaatggtccccatctccccagaagcctttttttttttcatttttctctaattagtctatgcatttctctctctcaaaccatcttctgcctcttcccttgagaaaacgggcatctcacgtacccccatctgagacctcttggaaaaaaaaaatcccgtgtattctggagatgtgagaattcacccaaaattcttaaaacattggagaatagcttgttataaaataaaagtgggggtaaaaagaaggtggttttccccacatccctttgcattgaataagagacctagttctttgcgtttgtgcaataactctttgctgcttgccttgagagcgggtagcaccacgctcctgtccagactactaacagcacaagacgcactcacagggtggcggaatcttccggaaaactctctataagctcagctccccccaccccacccccactctagcgttttgtcacgtcttacattttagcagtattttatattttctgtaacgcaccaagtcttagatctttctagagcttgtttgttcatcctcacaatcacagatttttttctccaatcctcacagagacccaattgaccaaaaaagaaaaaaggaaaaaaaaaaagtcgtcttttttttttttttttgtacaaatcgctttgagatgcctctggtgtgttgctgtgtgacatctctctggtaacattttatttcttgctatttgtttttctacattaagagtcaaagttgacctggctggcgtgggggtgggggaggcacccgtcggccccttggtgttgtccctctgtctttggttagccatacgatgtttgttctcagcactgtacaacggtccctatataatacggagaagcaatatcactgtatgagactcacaccatgtattattattcactagcaccctaggtgtgataattgaagtaaatatcttttatacaaacacaaaaaaaaaaaaaaa

SEQ ID NO: 6767 - DNA, 1486 bp, Homo Sapiens
  NM_181573
cgcgctcacgtctgaagtgggagcaatgcaccgggacagggacacctcctaggccatgcctgttccagtccagttctgcctgaaagtccggctggctcatcacctgcctaaataaaaccgtatacgggcaaactccctccgcaagcagcgcgccccagcaccggaagtgacgcgttacgtgcccgcgtattcctaccggcgtattcccgccctgcttttcgcccgccgttccgtggcgggaactgaggcgactgtggggacatcagtgatcggtgaagtaccatgcaagcatttcttaaaggtacatccatcagtactaaacccccgctgaccaaggatcgaggagtagctgccagtgcgggaagtagcggagagaacaagaaagccaaacccgttccctgggtggaaaaatatcgcccaaaatgtgtggatgaagttgctttccaggaagaagtggttgcagtgctgaaaaaatctttagaaggagcagatcttcctaatctcttgttttacggaccacctggaactggaaaaacatccactattttggcagcagctagagaactctttgggcctgaacttttccgattaagagttcttgagttaaatgcatctgatgaacgtggaatacaagtagttcgagagaaagtgaaaaattttgctcaattaactgtgtcaggaagtcgctcagatgggaagccgtgtccgccttttaagattgtgattctggatgaagcagattctatgacctcagctgctcaggcagctttaagacgtaccatggagaaggagtcgaaaaccacccgattctgtcttatctgtaactatgtcagtcgaataattgaacccctgacctctagatgttcaaaattccgcttcaagcctctgtcagataaaattcaacagcagcgattactagacattgccaagaaggaaaatgtcaaaattagtgatgagggaatagcttatcttgttaaagtgtcagaaggagacttaagaaaagccattacatttcttcaaagcgctactcgattaacaggtggaaaggagatcacagagaaagtgattacagacattgccggggtaataccagctgagaaaattgatggagtatttgctgcctgtcagagtggctcttttgacaaactagaagctgtggtcaaggatttaatagatgagggtcatgcagcaactcagctcgtcaatcaactccatgatgtggttgtagaaaataacttatctgataaacagaagtctattatcacagaaaaacttgccgaagttgacaaatgcctagcagatggtgctgatgaacatttgcaactcatcagcctttgtgcaactgtgatgcagcagttatctcagaattgttaacgtgaatatatctggatggggggttttgtaaataatgaagttgtaataaaaataaaatgaccaaaagcacctttaaaaaaaaaaaaaaaaaaaaaaaaaaaaaaaaaaaaaa

SEQ ID NO: 6768 - DNA, 2252 bp, Homo Sapiens
  NM_181581
catggctccaggcccacctggcgaactgactctcagcccgcgcctgggctaagcctggctaggagccgcgcaggtactcgagcagtgggcgcccagggtccgagtgctctgcgcccagcgcaccgagggagccaaggccgtcgggccggcgctttcagctgtctctcgcagcagctcagggccgcgccccctgggctggcgtcgtgccctagccaaggagaagtttcagtcacgtgccagactttttcttaattacaaactgatagatggtccacatctcaactaacagtattgacgctgtaagagcatcagatttgaaacatatctgtattaatgaagagtgactgcatgcaaacgacaatatgtcaggaaagaaaaaaagatcccatagaaatgtttcattctggacagctggtaaaagtctgtgccccaatggttcgatattcaaagttggcttttaggacactagtaagaaaatatagttgtgatctgtgttacacaccaatgattgttgccgctgattttgtcaaatctataaaagccagagacagcgaatttaccacaaatcaaggtgattgcccattgattgttcagtttgctgctaacgatgcaagacttttatctgatgctgctcgtatagtctgtccttatgcgaatggaatagacattaactgtggttgccctcagaggtgggcaatggcagaaggttatggggcttgcttaataaacaagccagagcttgttcaagacatggtgaaacaagtaagaaatcaagtggaaacccctggattttcagtttctattaaaataaggatccatgatgaccttaaaagaactgtagatctttgtcaaaaggctgaagcaacaggagtttcatggattacagtccatggaagaactgctgaagaaagacatcagccagtgcactatgattccattaaaataattaaggaaaatatgtctatacctgtaattgctaatggagacatcagaagcttaaaggaagcagaaaatgtgtggcggattactgggacagatggtgtgatggttgcaagaggactcttagcaaacccggccatgtttgctggatatgaggaaaccccactgaaatgcatctgggactgggttgacattgctcttgaactcgggactccttacatgtgtttccatcaacatttaatgtacatgatggaaaagataacttcaaggcaggaaaaaagggtatttaatgctctgtcaagcacatcagcaatcatagattaccttacagaccattatggcatttgactagacttcccaaataattttaatatatacttttagacccacagtgaaaccacagaaggtcatattttgtaccttaaaccagtagctctcaaattttagtataaaaacaattcctgggagcgttttttaaaaatcagttgtagacaccaccctcagagattctgattaggtagatctggagtagacccagaaatacacagtttaaagaaaactcccagtggttcaaacatcctgatcatcctaggcaaacattgacaaatactgctctgaatcctgttctatagatattggggggatgggtagagtgggaattttttcctaatcatgtttttaacattttaaaataaaatttaatactaagaaattatggcttatagtatctataaattaacaagaagtatgcaggtgcaaaaaagtggtggaacaaataccaacatccatccaaaatgaaaaagaacaggaaattctgaatagaattgcactcagaacttatattaaaaattccatttggttaatgacattaaatttggtacatttcaaaacttctaggtcctccaaagattgaaagcttaataatctcctacctaaaaagataaaattaattgcaatctaccatatcttaagtataggaaatttggtgtccaacctggagatgattatatatttgaaatatttcctagagaatagtaaccaggttttgtttttaactttaaaacctaattacttttgtgcctctcagccgttgattgtaactttaaagtcccatggttttggagtgttattaatagattttgttatcggtgggcatgcactgcaagaattaagtatctcagactgaaataaaaccgttcataattaaagtattattttgttttgccaacatgaaaactgttataaggaaacaattatgtaaaactgtttaattcacgtttgggaatattgaatgaatccattttaacataaaa

SEQ ID NO: 6769 - DNA, 330 bp, Homo Sapiens
  NM_181612
attgaactgaatctctagtccctgacaccatgagatactatggcagctactacagaggcctgggatatggctgtggaggctttggtggtctgggctatggctgtggctgtggaggctacagatatggctctggctatggaggctatagatatggctgctgccgcccatcatgccgtgaaggttatggattctctggattctactaaaaaacttgctgattctcatactctaactccaagatcttgcccgtatgcttcagcaaggcgaacacttttctcaatgtagagaaaatacctaccattttttggcttcatgctccagaaggaacaa

SEQ ID NO: 6770 - DNA, 198 bp, Homo Sapiens
  NM_181616
atgtgctactacagcaactactatggtggtctgcgttatggctatggagtcctgggcggtggctatggctgtggctgtggttatggccatggctatggaggcctgggctgtggctatggccgtggctatggtggctatggatatggctgctgccgcccatcttgctatggaagatactggtcctgtggcttctactga

SEQ ID NO: 6771 - DNA, 692 bp, Homo Sapiens
  NM_181652
gcagtggaggcggcccaggcccgccttccgcagggtgtcgccgctgtgccgctagcggtgccccgcctgctgcggtggcaccagccaggaggcggagtggaagtggccgtggggcgggtatgggactagctggcgtgtgcgccctgagacgctcagcgggctatatactcgtcggtggggccggcggtcagtctgcggcagcggcagcaagacggtgcagtgaaggagagtgggcgtctggcggggtccgcagtttcagcagagccgctgcagccatggccccaatcaaggttcggctcctggctgatcccactggggcctttgggaaggagacagacttattactagatgattcgctggtgtccatctttgggaatcgacgtctcaagaggttctccatggtggtacaggatggcatagtgaaggccctgaatgtggaaccagatggcacaggcctcacctgcagcctggcacccaatatcatctcacagctctgaggccctgggccagattacttcctccacccctccctatctcacctgcccagccctgtgctggggccctgcaattggaatgttggccagatttctgcaataaacacttgtggtttgcggccaaaaaaaaaaaaaaaaaaaaaaaaaaaaaaaaaaaaaaaaaaaaaaaaaaaaaaaaaaaaaaaaaaaaaaaaaaaa

SEQ ID NO: 6772 - DNA, 4331 bp, Homo Sapiens
  NM_181657
ctggtcctgggtgtggggaagaaaggccatcaaggtagatgcgggtggggaacagcttgagagaggaggcaaggacaacccagtttctgtctgaaggggcctctggttgaccctggagtttctgtccccaaacacaggcctcacgggattctttctgtcctcatgcactgggcagaggttccttaacttcctttgttgcacattgccattctctcacatcccgtgcggtcaggaagcccttcctgaactctgacttcagttcttgctgcggtttctgcccatttttttcatatcctctgacagctgcgaggtcatctctgctctggcttttctccaagcagaacaagtgggggctctggaaaggttaagggacctcagtggccaccattatactttgcatctttcctgagaagtgagagttgaaagggaagcaggaaggcccatggtcagattgaaggaaggactttttagtttcttttttttttttttttttttttgagatggagtctcgctctgtcattcaggctggagtgcagtggtgcgatctcagctcactgcagcctccacttcctgggttcacatgattctcctgcctcagcctcccaagtagctgagactacaggcacatgccactacacccagctatcttttgtatttttagtagagacggggtttcaccatgttggccaggctggtctcaaactgctaacatcaagtgatctgctcccctcagcctcccaaagtgctgggattaccggtatgaaccaccacaacctgccaggaatttttagtttttagcttttgcaggagacttcaaggaaaggagacattcctctgtccaggaaacgggtaaggggaccatttctgcattgctggtttcccctcttggcagggtgggcatgaggcatcactgttcctgctccctcactcctgctcctcatgctcagcctgccagctcggcctcaactttgtgtgtctaaagtggaactgaatagtaggctgtgagaagataggaaagaggtagtgccaatctccttgcccagatcataaatccagactcagcagggtaaccacatgggcaagcacaaggtaggtgcttggggaaaggggaagtaattggcattctgtgtgataccaaggagaccatttggattttggcttctaccaaagagaatggagaattggttgacctaaatggaaccagtccctttaagtaaggggaggaaagggggtgctggaagatggccctcttcccaccacctagatcatagcttgaactgaagccaaggacagagtgctgcccccttcggcatttactgatgtgccctctttaaatcatgatgttatctaacccaaacccagacccaggacctagtcacagctccaacctacacttcctattaatcttaaaacaaagcaaaacaaaacaaaaagatatcagcattgtagcctccaatctgagcccatttcccttctctggctaccatacctccttctcctatatgataccattcactactttgttcaattatccagtctagacctgcatcttgaggccacacccagccttctcactccccacacccctctttcctctctcactgctccttcctggtctcttctcatctggccccacctctaaggagtcctcctgccttctgggttgccctggaaaacagactatcccccctcctagtgaagggagtgggtaggggtttcagccccaccctcaggaagatgcgtcttccctgtcctctgctctgtggtacttcctctctggctgatttagcaaacagcacctagacctggggccaggcctttggcagtgggacagatccagggataggctacaccaccctgccctgaccctgggattggcatcagcttccaaccagttcctgccaaagcttgtaagtcctcccgacggccatgaacactacatcttctgcagcacccccctcactaggtgtagagttcatctctctgctggctatcatcctgctgtcagtggcgctggctgtggggcttcccggcaacagctttgtggtgtggagtatcctgaaaaggatgcagaagcgctctgtcactgccctgatggtgctgaacctggccctggccgacctggccgtattgctcactgctccctttttccttcacttcctggcccaaggcacctggagttttggactggctggttgccgcctgtgtcactatgtctgcggagtcagcatgtacgccagcgtcctgcttatcacggccatgagtctagaccgctcactggcggtggcccgcccctttgtgtcccagaagctacgcaccaaggcgatggcccggcgggtgctggcaggcatctgggtgttgtcctttctgctggccacacccgtcctcgcgtaccgcacagtagtgccctggaaaacgaacatgagcctgtgcttcccgcggtaccccagcgaagggcaccgggccttccatctaatcttcgaggctgtcacgggcttcctgctgcccttcctggctgtggtggccagctactcggacatagggcgtcggctacaggcccggcgcttccgccgcagccgccgcaccggccgcctggtggtgctcatcatcctgaccttcgccgccttctggctgccctaccacgtggtgaacctggctgaggcgggccgcgcgctggccggccaggccgccgggttagggctcgtggggaagcggctgagcctggcccgcaacgtgctcatcgcactcgccttcctgagcagcagcgtgaaccccgtgctgtacgcgtgcgccggcggcggcctgctgcgctcggcgggcgtgggcttcgtcgccaagctgctggagggcacgggctccgaggcgtccagcacgcgccgcgggggcagcctgggccagaccgctaggagcggccccgccgctctggagcccggcccttccgagagcctcactgcctccagccctctcaagttaaacgaactgaactaggcctggtggaaggaggcgcactttcctcctggcagaatgctagctctgagccagttcagtacctggaggaggagcaggggcgtggagggcgtggagggcgtgggagcgtgggaggcgggagtggagtggaagaagagggagaggtggagcaaagtgagggccgagtgagagcgtgctccagcctggctcccacaggcagctttaaccattaaaactgaagtctgaaatttggtcaaccttgtgagtggggtacatgtgctgtgggtatcggggtgctcgtgggcgccctggtggggcccctctcggtagttgagagtcacgtcctttagttccccatgatttacaattttggaagggacacaaagaaacatagacttcccccatcccagatgattccgagtacatagtctgcagataatacttagcaaaacgcagtctacagactcctaaagcagcttgtctaggaagaccacccatgtgggcttatcactccaggttctgtgacccgggaccttctgagaaaacagcactgctgtgaaatatcttccttgaagcctgtgataagtctccttgttagaatgactccaacttcctgccaataatctttgtcctctccataggagatgttctaggggatgccttccttccctccatttcacaaagaggccagacttgaggactaagtcattagatcttatcccttagaattttgcatatcagcatctgctaacctccacaacacaccctggcacagggtggggctgagggccccaggaaacaaagattcccaaaagtgagagggatgagtcattatttcctagagatgactgttgttttagagaaccttggtccaactctgttctgacaaggttttaggaagatggcaacaacagtggcagcagtgtactttttggatctttctcataaaaaaacaaaagagcaagtaagagagggaaaccaaatatccacatgcaacatccgcaacaaatctagtatgtcaaggtttgacatactcccatggaccccaaagtatgagccagtgagaatgagtcatcaatatctcaagacccatataccagcatctgtgcagaaggatgcagaaggaagcaaagggatgttggatggacctaagaagaggagatccccaagctgtctacagatccttactggaaggtatggtgcaccaatttgagaacagcagctgaaactgggagggacctaacggagtatttcccagtcctctcgcccattctgtatggtgagcacataataggtacttatttagtgtttgtcgaattaataaagttcaaatgacatttccctggaaaaaaaaaaaaaaaaaa

SEQ ID NO: 6773 - DNA, 2124 bp, Homo Sapiens
  NM_181671
cgggcatgtcctgatctggcggccgctcctaccaccctgggcagccgagcagagtcgtccccagcgggtctccctccctgcctccctgactttgcaacaccgcgttccgggaggaccggcctcggcgagggaggaggcgggggagctgcgaacacccagacccaaaccctgacatgctctggggcggagaggaggaagccaggagctgagcgcgccgcgggggctgcttcgccctccggctccgagcgccgggctccgggcgccctgccctgcgcctgggcagcagccttgctggtcttgggggcgccccccgcttcccgccccgggggtccgcggccggcaggaccatgctgctgaaagagtaccggatctgcatgccgctcaccgtagacgagtacaaaattggacagctgtacatgatcagcaaacacagccatgaacagagtgaccggggagaaggggtggaggtcgtccagaatgagccctttgaggaccctcaccatggcaatgggcagttcaccgagaagcgggtgtatctcaacagcaaactgcctagttgggctagagctgttgtccccaaaatattttatgtgacagagaaggcttggaactattatccctacacaattacagaatacacatgttcctttctgccgaaattctccattcatatagaaaccaagtatgaggacaacaaaggaagcaatgacaccattttcgacaatgaagccaaagacgtggagagagaagtttgctttattgatattgcctgcgatgaaattccagagcgctactacaaagaatctgaggatcctaagcacttcaagtcagagaagacaggacggggacagttgagggaaggctggagagatagtcatcagcctatcatgtgctcctacaagctggtgactgtgaagtttgaggtctgggggcttcagaccagagtggaacaatttgtacacaaggtggtccgagacattctgctgattggacatagacaggcttttgcatgggttgatgagtggtatgatatgacaatggatgatgttcgggaatacgagaaaaacatgcatgaacaaaccaacataaaagtttgcaatcagcattcctcccctgtggatgacatagagagtcatgcccaaacaagtacatgacaatggatgaagtccgagaatttgaacgagccactcaggaagccaccaacaagaaaatcggcattttcccacctgcaatttctatctccagcatccccctgctgccttcttccgtccgcagtgcgccttctagtgctccatccacccctctctccacagacgcacccgaatttctgtccgttcccaaagatcggccccggaaaaagtctgccccagaaactctcacacttccagaccctgagaaaaaagccaccctgaatttacccggcatgcactcttcagataagccatgtcggcccaaatctgagtaactttatataaatatctcatggggttttatattttcatttgttgttgttgtttttttttaagaatcttctgatagagaaaaagactgctttgtcactcaaacatgttccttcgacctttcagtgtgcatgtgactcagtaacttcacatagaatatgattccctaagtatgctacacagcatcatattagatgtaagatgtaagacttgcaaaggacagaaggaatcttctgtaaccacatagctgtatgccagagaggaagccttgttattgggcatttgatgaggtttggcatggacttcaaggataaatgaatgaaaactttgcaccacttttgttacaaggtacggtagaaaatagtgaagtcagtttcctctcatcaaatctaaaattctccaaaatactctcaggcataacatacttagctgttaaattttgaactgctaattactaatacttgaataccaatagttactgagattcctattttgtggttagtctgactcaggatttggagcctaattaactctaaacttttgaaaattttaatcatcaagctatagaggctccaagtgcaattaataataactcatttataccttccacagaatttaataaagattctacttgtttctgtcttttaaaaaaaaaaaaaaaaaa

SEQ ID NO: 6774 - DNA, 5497 bp, Homo Sapiens
  NM_181672
agttccggcccatgttgtttcggccgaggagccgtcgccgccatttcaagaccgtactaggtagatggtcaattagagttcccagggtttgaagcctgtaactgctgccgccgctcaagccctccagagcattgctacggctgctgcccttgtactactacctccaaatacgttcttgctggtagtggcggcagcaggaccaattacctcttttttgctctccctcgagaagctccagatggcgtcttccgtgggcaacgtggccgacagcacagaaccaacgaaacgtatgctttccttccaagggttagctgagttggcacatcgagaatatcaggcaggagattttgaggcagctgagagacactgcatgcagctctggagacaagagccagacaatactggtgtgcttttattactttcatctatacacttccagtgtcgaaggctggacagatctgctcactttagcactctggcaattaaacagaacccccttctggcagaagcttattcgaatttggggaatgtgtacaaggaaagagggcagttgcaggaggcaattgagcattatcgacatgcattgcgtctcaaacctgatttcatcgatggttatattaacctggcagccgccttggtagcagcgggtgacatggaaggggcagtacaagcttacgtctctgctcttcagtacaatcctgatttgtactgtgttcgcagtgacctggggaacctgctcaaagccctgggtcgcttggaagaagccaaggcatgttatttgaaagcaattgagacgcaaccgaactttgcagtagcttggagtaatcttggctgtgttttcaatgcacaaggggaaatttggcttgcaattcatcactttgaaaaggctgtcacccttgacccaaactttctggatgcttatatcaatttaggaaatgtcttgaaagaggcacgcatttttgacagagctgtggcagcttatcttcgtgccctaagtttgagtccaaatcacgcagtggtgcacggcaacctggcttgtgtatactatgagcaaggcctgatagatctggcaatagacacctacaggcgggctatcgaactacaaccacatttccctgatgcttactgcaacctagccaatgctctcaaagagaagggcagtgttgctgaagcagaagattgttataatacagctctccgtctgtgtcccacccatgcagactctctgaataacctagccaatatcaaacgagaacagggaaacattgaagaggcagttcgcttgtatcgtaaagcattagaagtcttcccagagtttgctgctgcccattcaaatttagcaagtgtactgcagcagcagggaaaactgcaggaagctctgatgcattataaggaggctattcgaatcagtcctacctttgctgatgcctactctaatatgggaaacactctaaaggagatgcaggatgttcagggagccttgcagtgttatacgcgtgccatccaaattaatcctgcatttgcagatgcacatagcaatctggcttccattcataaggattcagggaatattccagaagccatagcttcttaccgcacggctctgaaacttaagcctgattttcctgatgcttattgtaacttggctcattgcctgcagattgtctgtgattggacagactatgatgagcgaatgaagaagttggtcagtattgtggctgaccagttagagaagaataggttgccttctgtgcatcctcatcatagtatgctatatcctctttctcatggcttcaggaaggctattgctgagaggcacggcaacctgtgcttagataagattaatgttcttcataaaccaccatatgaacatccaaaagacttgaagctcagtgatggtcggctgcgtgtaggatatgtgagttccgactttgggaatcatcctacttctcaccttatgcagtctattccaggcatgcacaatcctgataaatttgaggtgttctgttatgccctgagcccagacgatggcacaaacttccgagtgaaggtgatggcagaagccaatcatttcattgatctttctcagattccatgcaatggaaaagcagctgatcgcatccatcaggatggaattcatatccttgtaaatatgaatggctatactaagggcgctcgaaatgagctttttgctctcaggccagctcctattcaggcaatgtggctgggataccctgggacgagtggtgcgcttttcatggattatattatcactgatcaggaaacttcgccagctgaagttgctgagcagtattccgagaaattggcttatatgccccacactttttttattggtgatcatgctaatatgttccctcacctgaagaaaaaagcagtcatcgattttaagtccaatgggcacatttatgacaatcggatagttctgaatggcatcgacctcaaagcatttcttgatagtctaccagatgtgaaaattgtcaagatgaagtgtcctgatggaggagacaatgcagatagcagtaacacagctcttaatatgcctgttattcctatgaatactattgcagaagcagttattgaaatgattaaccgaggacagattcaaataacaattaatggattcagtattagcaatggactggcaactactcagatcaacaataaggctgcaactggagaggaggttccccgtaccattattgtaaccacccgttctcagtacgggttaccagaagatgccatcgtatactgtaactttaatcagttgtataaaattgacccttctactttgcagatgtgggcaaacattctgaagcgtgttcccaatagtgtactctggctgttgcgttttccagcagtaggagaacctaatattcaacagtatgcacaaaacatgggcctgccccagaaccgtatcattttttcacctgttgctcctaaagaggaacacgtcaggagaggccagctggctgatgtctgcttggacactccactctgtaatgggcacaccacagggatggatgtcctctgggcagggacccccatggtgactatgccaggagagactcttgcttctcgagttgcagcatcccagctcacttgcttaggttgtcttgagcttattgctaaaaacagacaagaatatgaagacatagctgtgaagctgggaactgatctagaatacctgaagaaagttcgtggcaaagtctggaagcaaagaatatctagccctctgttcaacaccaaacaatacacaatggaactagagcggctctatctacagatgtgggagcattatgcagctggcaacaaacctgaccacatgattaagcctgttgaagtcactgagtcagcataaataaagactgcacaggagaattacccctatacctgagcctcaaccttctgggggaaagggaactagataacatacttcttacttgtctgtacagtaccttgttgcagatgggtgatatataatggtaatagaatagcacagccagacttgcttcctgcatggtagggagagacacaaaagatgggaaactgcttttccacaaggaatctccgtagaattttgcggcgaccagatggtgcataggtctggaaggtctgatctcccttggtcttccatgggatggttagtgtggaggggagatatagattgtccggccgctttgtgattccatggattgattcagtcttctggatttttttttctttatattttgggtactggagcttttaaaaatgtttggtttcaggtatttttattcatgtgaagtgtatatgattctcttgagataaggttttaagctaaaatgttactccctgttttagtttctgaactctgacagattgacagggactttgctggtgtagtctttttataggttttataaaccacttgagcctatatcagtcgttttagtgtctgacctaatatttggagctatcagtgctttgttgatttagatgatgactcaagattttttctggtccatttcccatttccttttcttccctgacccccataccctcacccttaaaattctcctgtaactcaactaacaaaatcaagcctgattcaaaacatcctagggtgttttaaacacaccatctggtgccaaatgaagatttttaggagtgattactaattatcaagggcacagttgtggtactgtcattgataataatatagtttttttttttttcctaattttgacctgtttcaccagtgttttacccttgactgccccttctatgctgcttccaaaagtgatagtgtgtgtaagatttttaccttcctttctaaagttttttttttttttttttaagtgagtcctgttcttcctatttctttcagcagaaatgaaatcccaggtaagtataagtattcaagtatttgatcagtaagtcacagttatctccagtgcattaaataaccttcatcaagaaataggttataggtaaaatctctgaaggatcatctatgtattcaagtaattattttttagataataactgtcttctggacttggtcttgaagtctgtacagattcagcctcagtagtagcgaactgcactgctgtttggtttggagtacaaattagacttatagtcctcctggaacttgagttattaaaatcataggaataaaattatgggatctcaacaaagggtcgagggtttgaggcttaaacaagccaacatatgaatatatgttttgtctcgctatactgcacttacgctatccagttgcaggtaattttttgtctgctagtagtgttctagattatgtctttccaaagcgctgaggctgtgcacctattctgtagttgcagctgatgcctgaatgtatcctagctgacaaattattgattaataagaacttgaatttctggaagattcttactgttaaccaaattttgagcaaggagtctcaaaggtaattctgaaccagaattacatgttaatgaacagtgtaccttttaacagtgtaaatcacggaatatccgtgaagggatttcttaatttattttttaccggttgattgaaatatcagttaaaggttgccagcatggttgcagataaactgatgtttgaaattcgctgaaatacttaatgtggaataggataatatacttccaatgccctcaaggctgtgaccttacagccattttacatagcacatcattcctcctatagggatgaactttttcctggcacgaaaagtagccgctctggttgaagctttgcttattgtaacaggcttttatttccaggtaatatgtcttggaagacttaattctgattagagatatagatattactggaaactaattgttttttttctattgtactctgctttatcaaagaagtaaaacatttaaatcgtactacagaaattaagatgttgtcttgcgatccttaataaatgaatgatttccctttaatacggaaaaaaaaaaaaaaa

SEQ ID NO: 6775 - DNA, 5467 bp, Homo Sapiens
  NM_181673
agttccggcccatgttgtttcggccgaggagccgtcgccgccatttcaagaccgtactaggtagatggtcaattagagttcccagggtttgaagcctgtaactgctgccgccgctcaagccctccagagcattgctacggctgctgcccttgtactactacctccaaatacgttcttgctggtagtggcggcagcaggaccaattacctcttttttgctctccctcgagaagctccagatggcgtcttccgtgggcaacgtggccgacagcacagggttagctgagttggcacatcgagaatatcaggcaggagattttgaggcagctgagagacactgcatgcagctctggagacaagagccagacaatactggtgtgcttttattactttcatctatacacttccagtgtcgaaggctggacagatctgctcactttagcactctggcaattaaacagaacccccttctggcagaagcttattcgaatttggggaatgtgtacaaggaaagagggcagttgcaggaggcaattgagcattatcgacatgcattgcgtctcaaacctgatttcatcgatggttatattaacctggcagccgccttggtagcagcgggtgacatggaaggggcagtacaagcttacgtctctgctcttcagtacaatcctgatttgtactgtgttcgcagtgacctggggaacctgctcaaagccctgggtcgcttggaagaagccaaggcatgttatttgaaagcaattgagacgcaaccgaactttgcagtagcttggagtaatcttggctgtgttttcaatgcacaaggggaaatttggcttgcaattcatcactttgaaaaggctgtcacccttgacccaaactttctggatgcttatatcaatttaggaaatgtcttgaaagaggcacgcatttttgacagagctgtggcagcttatcttcgtgccctaagtttgagtccaaatcacgcagtggtgcacggcaacctggcttgtgtatactatgagcaaggcctgatagatctggcaatagacacctacaggcgggctatcgaactacaaccacatttccctgatgcttactgcaacctagccaatgctctcaaagagaagggcagtgttgctgaagcagaagattgttataatacagctctccgtctgtgtcccacccatgcagactctctgaataacctagccaatatcaaacgagaacagggaaacattgaagaggcagttcgcttgtatcgtaaagcattagaagtcttcccagagtttgctgctgcccattcaaatttagcaagtgtactgcagcagcagggaaaactgcaggaagctctgatgcattataaggaggctattcgaatcagtcctacctttgctgatgcctactctaatatgggaaacactctaaaggagatgcaggatgttcagggagccttgcagtgttatacgcgtgccatccaaattaatcctgcatttgcagatgcacatagcaatctggcttccattcataaggattcagggaatattccagaagccatagcttcttaccgcacggctctgaaacttaagcctgattttcctgatgcttattgtaacttggctcattgcctgcagattgtctgtgattggacagactatgatgagcgaatgaagaagttggtcagtattgtggctgaccagttagagaagaataggttgccttctgtgcatcctcatcatagtatgctatatcctctttctcatggcttcaggaaggctattgctgagaggcacggcaacctgtgcttagataagattaatgttcttcataaaccaccatatgaacatccaaaagacttgaagctcagtgatggtcggctgcgtgtaggatatgtgagttccgactttgggaatcatcctacttctcaccttatgcagtctattccaggcatgcacaatcctgataaatttgaggtgttctgttatgccctgagcccagacgatggcacaaacttccgagtgaaggtgatggcagaagccaatcatttcattgatctttctcagattccatgcaatggaaaagcagctgatcgcatccatcaggatggaattcatatccttgtaaatatgaatggctatactaagggcgctcgaaatgagctttttgctctcaggccagctcctattcaggcaatgtggctgggataccctgggacgagtggtgcgcttttcatggattatattatcactgatcaggaaacttcgccagctgaagttgctgagcagtattccgagaaattggcttatatgccccacactttttttattggtgatcatgctaatatgttccctcacctgaagaaaaaagcagtcatcgattttaagtccaatgggcacatttatgacaatcggatagttctgaatggcatcgacctcaaagcatttcttgatagtctaccagatgtgaaaattgtcaagatgaagtgtcctgatggaggagacaatgcagatagcagtaacacagctcttaatatgcctgttattcctatgaatactattgcagaagcagttattgaaatgattaaccgaggacagattcaaataacaattaatggattcagtattagcaatggactggcaactactcagatcaacaataaggctgcaactggagaggaggttccccgtaccattattgtaaccacccgttctcagtacgggttaccagaagatgccatcgtatactgtaactttaatcagttgtataaaattgacccttctactttgcagatgtgggcaaacattctgaagcgtgttcccaatagtgtactctggctgttgcgttttccagcagtaggagaacctaatattcaacagtatgcacaaaacatgggcctgccccagaaccgtatcattttttcacctgttgctcctaaagaggaacacgtcaggagaggccagctggctgatgtctgcttggacactccactctgtaatgggcacaccacagggatggatgtcctctgggcagggacccccatggtgactatgccaggagagactcttgcttctcgagttgcagcatcccagctcacttgcttaggttgtcttgagcttattgctaaaaacagacaagaatatgaagacatagctgtgaagctgggaactgatctagaatacctgaagaaagttcgtggcaaagtctggaagcaaagaatatctagccctctgttcaacaccaaacaatacacaatggaactagagcggctctatctacagatgtgggagcattatgcagctggcaacaaacctgaccacatgattaagcctgttgaagtcactgagtcagcataaataaagactgcacaggagaattacccctatacctgagcctcaaccttctgggggaaagggaactagataacatacttcttacttgtctgtacagtaccttgttgcagatgggtgatatataatggtaatagaatagcacagccagacttgcttcctgcatggtagggagagacacaaaagatgggaaactgcttttccacaaggaatctccgtagaattttgcggcgaccagatggtgcataggtctggaaggtctgatctcccttggtcttccatgggatggttagtgtggaggggagatatagattgtccggccgctttgtgattccatggattgattcagtcttctggatttttttttctttatattttgggtactggagcttttaaaaatgtttggtttcaggtatttttattcatgtgaagtgtatatgattctcttgagataaggttttaagctaaaatgttactccctgttttagtttctgaactctgacagattgacagggactttgctggtgtagtctttttataggttttataaaccacttgagcctatatcagtcgttttagtgtctgacctaatatttggagctatcagtgctttgttgatttagatgatgactcaagattttttctggtccatttcccatttccttttcttccctgacccccataccctcacccttaaaattctcctgtaactcaactaacaaaatcaagcctgattcaaaacatcctagggtgttttaaacacaccatctggtgccaaatgaagatttttaggagtgattactaattatcaagggcacagttgtggtactgtcattgataataatatagtttttttttttttcctaattttgacctgtttcaccagtgttttacccttgactgccccttctatgctgcttccaaaagtgatagtgtgtgtaagatttttaccttcctttctaaagttttttttttttttttttaagtgagtcctgttcttcctatttctttcagcagaaatgaaatcccaggtaagtataagtattcaagtatttgatcagtaagtcacagttatctccagtgcattaaataaccttcatcaagaaataggttataggtaaaatctctgaaggatcatctatgtattcaagtaattattttttagataataactgtcttctggacttggtcttgaagtctgtacagattcagcctcagtagtagcgaactgcactgctgtttggtttggagtacaaattagacttatagtcctcctggaacttgagttattaaaatcataggaataaaattatgggatctcaacaaagggtcgagggtttgaggcttaaacaagccaacatatgaatatatgttttgtctcgctatactgcacttacgctatccagttgcaggtaattttttgtctgctagtagtgttctagattatgtctttccaaagcgctgaggctgtgcacctattctgtagttgcagctgatgcctgaatgtatcctagctgacaaattattgattaataagaacttgaatttctggaagattcttactgttaaccaaattttgagcaaggagtctcaaaggtaattctgaaccagaattacatgttaatgaacagtgtaccttttaacagtgtaaatcacggaatatccgtgaagggatttcttaatttattttttaccggttgattgaaatatcagttaaaggttgccagcatggttgcagataaactgatgtttgaaattcgctgaaatacttaatgtggaataggataatatacttccaatgccctcaaggctgtgaccttacagccattttacatagcacatcattcctcctatagggatgaactttttcctggcacgaaaagtagccgctctggttgaagctttgcttattgtaacaggcttttatttccaggtaatatgtcttggaagacttaattctgattagagatatagatattactggaaactaattgttttttttctattgtactctgctttatcaaagaagtaaaacatttaaatcgtactacagaaattaagatgttgtcttgcgatccttaataaatgaatgatttccctttaatacggaaaaaaaaaaaaaaa

SEQ ID NO: 6776 - DNA, 2182 bp, Homo Sapiens
  NM_181676
atatcctgctggatttctcttgcgaaaagagaaactcaccacacgggaaaaggtagaggtttcaggcagagcatttcagcgtgtgtttacaggcaggactgacttactcagcaaatcctgttcagaggagcttcagccaatgaagaggctatatcccggcttgcttgggggcttctgagtttgagctgcatgcagaaatgtaaggcagtgcttcctggcgctgatggcaaaatgggacccatctccagttattcctcgggcaccccagctttgcaaatctgggaaagaacctacataaacatattggtgatgtagccagcttaaaaggccgagagaatccttatggattcaggagactgtttttttatttagatttttattttttatttggaagatgaaatgcttctctcgttacctgccttacatcttcagacctccgaacaccatcctttcttccagctgccacacagaagctgacattatctctacggtagaattcaaccacacgggagaattactagcgacaggggacaaggggggtcgggttgtaatatttcaacgagagcaggagagtaaaaatcaggttcatcgtaggggtgaatacaatgtttacagcacattccagagccatgaacccgagttcgattacctgaagagtttagaaatagaagaaaaaatcaataaaataagatggctcccccagcagaatgcagcttactttcttctgtctactaatgataaaactgtgaagctgtggaaagtcagcgagcgtgataagaggccagaaggctacaatctgaaagatgaggagggccggctccgggatcctgccaccatcacaaccctgcgggtgcctgtcctgagacccatggacctgatggtggaggccaccccacgaagagtatttgccaacgcacacacatatcacatcaactccatatctgtcaacagcgactatgaaacctacatgtccgctgatgacctgaggattaacctatggaactttgaaataaccaatcaaagttttaatattgtggacattaagccagccaacatggaggagctcacggaggtgatcacagcagccgagttccacccccatcattgcaacaccttcgtgtacagcagcagcaaagggacaatccggctgtgtgacatgcgggcatctgccctgtgtgacaggcacaccaaattttttgaagagccggaagatccaagcaacagatcatttttctctgaaattatctcttcgatttcggatgtgaagttcagccacagtgggaggtatatcatgaccagggactacttgaccgtcaaagtctgggatctcaacatggaaaaccgccccatcgagacttaccaggttcatgactacctccgcagcaagctgtgttccctctatgaaaatgactgcatttttgataaatttgagtgtgtgtggaatgggtcagacagtgtcatcatgacaggctcctacaacaacttcttcaggatgttcgacagaaacaccaagcgtgatgtgacccttgaggcttcgagggaaaacagcaagccccgggctatcctcaaaccccgaaaagtgtgtgtggggggcaagcggagaaaagacgagatcagtgtcgacagtctggactttagcaaaaagatcttgcatacagcttggcatccttcagaaaatattatagcagtggcggctacaaataacctatatatattccaggacaaggttaactaggtggacaagttattacttaataatctcacatactgaatactagtcaaacaagtttttaaatgtttctttgggtcttcatttgatgcattgactttaatttccctatacaggaaatgattggaatagaattaaaaggagtccaacattcccagctccccagttctaagaaacttttgtcaaacccaataggtttgggacacttctgtttagaattgaaagctgccagctaacagtaattcttccatagttgacttgaacttctgatgcttttattgcccagttttctctggtgggtccagtgttttgttcctaggtgtctgctgcgataaaatgaggttgtctgtagtatttaaggagaaaagagataagttttttttaattaagcaattccatttgattgaaaaaaatcaacaaaaaataaacaccgtttactcttagacaaaaaaa

SEQ ID NO: 6777 - DNA, 4549 bp, Homo Sapiens
  NM_181701
ccagggtgaaagttcagcgcgccggcggcacttccaacatggcggcggccggggcggcggtggcgcgcagcccgggaatcggagcgggacctgcgctgagagcccggcgctcgcccccgccgcgggccgcacggctgccgcggctgctagtgctgctagcggcggcggcggtggggccgggcgcgggcggtgcggcgcggctgtaccgcgcgggcgaggacgccgtgtgggtgctggacagcggcagcgtgcgcggggccaccgccaacagctcggccgcgtggctcgtgcagttctactcgtcgtggtgtggccactgcatcggctacgcgcccacttggcgggccctggctggggatgtgcgagactgggccagtgccattcgcgtcgcagctctggactgcatggaagagaagaaccaggccgtgtgccatgactacgacatccacttctaccccaccttccggtattttaaagcatttacaaaggagtttacaactggagaaaattttaaaggacctgaccgagagctgcgaacagtcagacagacgatgattgacttcctgcagaaccacacggaaggaagccggccccctgcctgcccgcgcctagaccccattcagcccagtgatgttctttcccttcttgacaaccgtggcagccattacgtggctattgtctttgaaagcaacagctcctaccttggacgggaggtgatcttagacctgatcccgtatgaaagcatcgtggtgacccgagcactggacggggacaaagcatttctggagaaacttggtgtttcttcagtcccttcgtgttacctgatctacccaaatgggtcgcatggattgattaacgtcgtgaagcctctgcgggccttcttttcgtcttatttgaagtcattgccggatgtgaggaaaaaatcgcttcccttgcctgaaaagccacacaaagaagaaaattcagaaatcgtggtttggagagaatttgacaagtcgaagctgtacacggtggacctggagtcagggctacactacctcctgcgggtggagctggcagcccacaagtccctggccggagcagagctgaagacgctcaaggactttgtgactgtcttggccaagctgttccctggacggccgccagtcaagaagctgttggagatgctgcaggagtggctggccagccttcccctggacaggatcccctacaacgccgtgcttgacctggtcaacaacaagatgcggatttctggaatattccttactaatcacataaagtgggttggatgtcaaggaagccgatctgagttgaggggttacccgtgttctctctggaaactgttccacactttgactgttgaagcctcgacccacccagatgcactggttggcacaggctttgaagacgacccccaggctgtgctgcagacaatgaggaggtacgttcacaccttctttgggtgtaaggaatgtggtgagcactttgaggaaatggctaaagaatccatggactcggtgaaaaccccagaccaagccatcctctggctgtggaagaagcataatatggtgaacggccgcctggcaggccatctgagtgaggatccccggtttccaaagcttcagtggcccactccggacctctgcccagcctgccatgaggaaattaagggcctggccagctgggatgaaggccacgtgctcacattcttgaagcagcactatggccgcgacaacctcttagacacgtattccgcagaccagggggattccagtgaaggaggaaccctggccaggggtgaggaagaggagaaaagactcactcccccagaggtgtcccatggagaccgagacacccagagcgtccgtccacctggtgcactgggccccaggcctgcccttccagagagcttgcatcacagcttggacgggaaactccagagtctggatgggcccggggcccacaaggaggtgggcggggccgcacccttcctcggggttgacttctccagcctggacatgagtctctgtgtcgtgctgtacgtggcttcatccctgttcctcatggtgatgtacttcttcttccgggtgaggtccaggcggtggaaggtcaagcaccaccacccggccgtgtgagtgcccgggtgctgccagccacggcggaagctcccttggaggcagccctgccccgtgccacctgcagctttaatatttatgatcagggattttataaacatgcgggcctggtttcacatcggatggcaccttttggcttcaaagtcctggttttacaaacgctcttctaacaagggaagaacacggggtaattttgtggggatatttgcattcctggcgtactcaagtctgttcatgctccttttgcaggtcttacagcaaaaagacttctgtatttttactcttctagatgtgaaaagagggtgcagagtccaggccagatagtcttccccacacactttcatctcgtttcctccactccgccccatcctgcagggccttgtttttgtatttggagaacctcgcccatcccccccgcggctcctggctcccccccactcccctcgctccccctccccccgctccccccacgccccctgctccaggctgccaagtgttttcctttagccgggcggggacagacagagccggaagcgcagtcggcctctgcagcccctccaagcaagtgctccagggactatcctgtgtttgtagctgcttccctagggcaggttcctgagggctctccttgttcctccgggtgttcgacaccagacgtggggatttcaacaggggaggagccaaggaattctgtggctgtgctgcgtttcagaaaataacccccagaggccttgggctgtggacctgggggttggaaggatgggggctcatttaaccctcagaggcagcgcctttgtctgtctatctggtgacaagagagagacaagtaaatgggggccgttgggacggcgggtgcctggagggcagctctgggctcagcgggcagtgcttagagcacaggcccctctgttgggggatggggaggagagcagtctgcccttgggagcgtaggccccagggagacttctaaagccccccctgtcgtctgctcttcacccagcaccacagaggcacctgctgcacacacaagcatctcactcggcccacggagggggccaggcttcctttgcctgaagctgttttgggaagggtctccacacaggcactgatctcccaagcttttgtcatgatgtcttttaccatttgataattttaaacattgtttttaaacccaaaacatttagtggtccgttgcctctgaagatgtaaacaaacaaatacactatttctgggaacatttatattgagattctttgtggctattggtgtgtctcacaggcaaaatttgatttggctaaaataggctcagatgtatttgtgtgcccgtgtgtgtgtgtgtgtgtgtgtgtgtgtgtgtgtgtgtatgagagagagagagactttgacggttgtagatattttttccgctttgcctactttatgttgtataatcatgtgtttactaacaagttgatgacatggatgtattcataagaccatgtaatattgatgtgattgttgtcgcttgagaaaaaaaggcaacagctgattctttcaacaactgtcacagaatggctgggctgagaacgctgcccagggccctgcagctggcgggagaggtgtctggtgggagcggtgtctggtgcgtcagcctgctgcttcgtgtctcactcgagagttgcttctggtttcacactttttaacccctctgtgctttagcagccgtgaccttgccttcattgcttcatccagtgcaggcctgggttattgaagacaccaaagtgtttctcttccagtttgaaaaccaggcaggtttacacgtgggtttcagtgtatttgcctttgaacccttcaaactaaactttagccttttggctggtgttgaatgtctttagctggggtgacctggagtgacctgggacggtgttgtggtttaccgtctccagcttcagcctttccagaaacccttgtggagggcagtgttggctgcaggtttcatcatattgcagtttgaggtcaccactatttggggaacaagcttgcgtcctgctgaggggcaggattttcagcagagcgtcggtggggctgggccgtcgtggaggtggccccaggagtcatatggccatactcagacacaccttgtgtggcctgctcagagctggatgccacctttaggcaatgtttagagtctattttctaaagttttaagtattttaagaggtattgagactaatgaatataatagttcagtaatttaaatgcttatttattttcagtggaaggatttttattaaaaagaagctaattgacatggaaatgtcagtgaaatttcttacctgcaaggaaagtgaacattttgtatttaagtaaactataatgtgcacattttaataaagaaatctgacatttgaaaaaaaaaaaaaaaaaaaaaaaaa

SEQ ID NO: 6778 - DNA, 6213 bp, Homo Sapiens
  NM_181705
cagtctttgattggttgctgagaggcggggctactcgactgctctggaggtagcggccgcggtgaggagagccatgggacgggcagtcaaggttttacagctctttaaaacactgcacaggaccagacaacaagtttttaaaaatgatgccagagcattagaagcagccagaataaagataaatgaagaattcaaaaataataaaagtgaaacttcttctaagaaaatagaagagctaatgaaaataggttctgatgttgaattattactcagaacatctgttatacaaggtattcacacagaccacaatacactgaaactggtccctaggaaagaccttcttgtagaaaatgtgccatattgtgatgcaccaactcagaagcaatgagttttctagaatacaacaagtctttgtactttttaactttaaaatctacaactctggcaaaagtcctggaaatgcagacattttccctgaactggcatattgaaaatgaatgaattacagaatagcttcatatttaaatttcatgttaaaaggtcattactgagaactaaagaacataattaagtatttctaaaggaaattagataagaaaacatttcattttcattgaaaatcaaatttcataaagcaaagtaaatgcttagggagatatattcaatctttgaccttgatgagtatttgatcttaccatagctatttgagaatgtggtgcttttacaaattggtgagttttcctgccatgtgaaatgcaattattacatttaaattgttagattaaaatgatatttagtcctgaaaaatattaaattggtcaaaaaaatcacagtgtatgccagctctctacagaaagtggcctttgttttctaaagcactgggattatttctgtagctaatatataattgtacagtttctttttagagatagagagtatctctgtgttcttatgaagacattttttatcagttttctgaaaatagatgaataaaatattatagtcacctagggtcactatggaataaagaaatcctagtttaaagaggaaatagtggcccttgatcaaactatttaatatggccttagtagaattagctgtatttagacaaagttagactttagtgtgaaatgtaatcggtggctacattctcatcgttttaattaatgaaacttaaatggcttctcttcttccacatgtcctgtccttgacaagatgggcagtatcacaaaaggtcctggcattctaccatctaacactaggaactgtaaaatactgtttaatattcttcttgtttctcttttatctgtgtatctttgccattctattttctcagtgaatagtatgttttctcccattcactgataaattctctcatttgatgatgatacagggtttttaatttttgcaagattctcaatgcaagcattgttatgtatctagaaattatacctagagaaaaatgaaagtcgtttcaaatttgaaatttgcccttttaagagaatgctgaatgtcatcgcagtatataatcactatataaatgtgctgacttacagttattttagtgtctatatgacatattttgaggaaagttggctgacgttatttaaatttaatatatattctatattttagtgttattgaatattttatcactgagcttttttctttaacctgaattccctgttccatttttcattcatattaatttaaataactccagatttctttcttatagtcattattagtagcagatgagattaataattcacatgtttattaaagatagtggcttagaaattttaagatatattgatataggcccgggcgctgtggctcacacctgtaatcccgcactttgggaggctgaggcgggcagatcacaaggtcaggagttcgagaccagcctggccaatgtggtgaaaccccatctctactaaaaacacaaaaattagccaggtatggtggcgggcgcctgtagtcccagctactcgggaggctgaggcaggaaaatcacttgaacccgggaggtggaggttgcagtgaactgagattgtgccactgcactccagcctgggggacagagtgagactctgtctcaaaaaaaaaaaagaaaaaaaaaggaaaaaggaaaaaaaaaagatatattgatacagataggtagatatgatattgtactttcatgccataagactacacaataaagttcctgaaagttcctggctgggcgcagtggctcacgcctgtaatcccagcactttgggaggccgaggcaggcagatcacctgaggtcaggagttctagaccagcctgaccaacatggggaaaccctgtctctactaaaaaaaatacagaattagccaggtgtggtggcacatgtctgtaatcccagctactcgggagactgaggcaggagaattgcttgaacccaggagacggaggttgcagtgagccgagatcgcaccattgcactccagcctaggcaacaagagtgaaactccgtctcaaaaataaataaataaataaagttcctgtgaagtatataaacatgtcaacaacaggcttgactgtcacaaaattctgaaagatgtcgcactctattcttatatagcatatgctaatttatttatttattttttgagattgagttctgctgtgtcacccaggttggagtgcagtggcatggtcatggtccactaaagccttgacccctggggctcagcagttatgccaactaagcctcccaaatagctgagactagaggtatgcgccaccacacctagctattttttttatttttagtaaggacaaggtctcattatgttggccaggctggtctcaaattcctgagctcagttgatcctcccacctcagcctcccaaagtgctgggattacaggtgtaagccactgcaccctgcctattcttataatcatatatttatatttcaaatggattttaactggttatttaatagtttaattagataaagtaattcatggctgggtgtggtggctcacgcctgtaatcccagcactttggcaggctgaggcaggtggattacctgaggtcggaagttcgagaccagcccaaccaacgtggagaaaccccatctctattaaaaatgcaaaattagcaggacatggtgatacacacctgtaatcccagctagtcaggaggctgaggcaggagaattacttgagccagggaagcagaggttgtggtgagctaagattgtgccactgcactccagcctgagagaacaagactccgtctcaaaaaaagaaaaaaagaaaacttttttacacatgggtatctcaccatgttgcccaggctggagtgcagtagctattcataggcacagtcatagcacactgcagcctagaatttctgacctcaagcaatcatcctgcctcagcctcctaagtagctaggactacaggtgcataccaccataaccagctttaattaaatgttttttatttggttattttttttaagttttctgtattcacacaaggggttgcccaaatataattttgctttgactattgagatctagtgaaagtggggtatatgaattctaattgcaaatatccaggctcagaggcccagcaggactttctaacacaatcttttagcggaagttagaaatggtatatagcaggagagtcagatttgagaagcatatgtagattcgaagctgggggaatatggcaggtagtttgtacaacatctaattcagaacattaaaattaagattttagtcaaactgtgtttaagttagttcttattttcctgtagatgcatctcacagcatcagtacaataccaaaaaagcacacaagaataagaatatgtggaatttctatacctattgacaaagcacataatttaaccataaacacaaagccataggtcaacaaagaaatgaagattccagttctgaaggtgagttttctgaagccaaagtggatacatgcaaaattaatatagttttactgtatatcagttgtcaccaatcagaaatggaaaacagatcctatttataattgcaaacaaaactgtaaaatagactttttaaagtctgggaatagacttctaaaataagctataacacttaaaaaggagagatatactatgttcctagataggacaattgaaaattctggagatgacagtttttcaaaaatctattgaggccaggtgcagtggcccatgcctgtagttccagtactttgggaggcctaggtgggtggatcacctgaggttgggagtttgagaccagcctgaccaacatggagaaaccccgtctctactaaaaatacaaaattagccaggcgtggtggtgcatgcctgtaatcccagctactcgggaggctgaggcgtgagaatcgcttgaacccggtaggcagatgttgcagtgagccgagatcgcaccattgcactccagcctaggcaacaagagcgaaactccatctcaaaaatagaaaaaacatttatcgaaatcccaacaagttgacaaatatatccacataaaaatataaaacttctgtattctgtgaaagctactataaataaagtttagagaaagttatttgccacctatgtcatgattgaaatagttaattgatcctgtgaatcagttagcaaaacataactcaatggaaagataggcaaatgatacaaataagaaattcacaaaagaagaaatactaagtctctagtgatgagagaaatgtaaattaaaatgaaacatgtttgttcatcaagttgtcacaagttagacaatcatatccaatatttttaaaggttgtaagactataaggaaatagccactgtcatatcatttttaaaggaatataaattatagggccttttgtttctttgggttttttttttttagagacaagatctctccgtgttgtctaggctggactcaaacttctggactcaagcaatcctcgcaacatcattaatagctgagagtagagacttgagccaccacacctgactatagggcctttttgaaaggaaaattgacatcatcaaaattttaaatatattcagtctatttctcaaaaactcaaagaatactaataaatgtgtactcaggtatatgtacagaaattgctgtaacattataattttaaacaatttaaaacagactgagtttccaaagttagggtacaatgaaagaaaaggtggcttatttatactctggaatattttccaagagttgaaaaggatgaggatacacacacacacacacacacacacacacacacacacacacacacacagtttgggtatccctaatccagaaattcaaatgctccaaagtccaaaactttctgacccaccaacatgactgatgctcaaaggaaatggccactggaagatttcagattttcagatttggagtgctcaaccagtaagtatataatgcaaataatccaaaatacaaaaaaaaaaaaaaagaaatctgaaacacttctgatcccaagcatttcagaaaacggatgttcatttgtgtgtgtgtgtgtgtgtaagcaggtgttgctagaaattcacttatatacaagaaaactttttgtgtacatatttgcatatatatgtacaaatgggtagaaacgatacatgattaatcttaatcgggaaggaaaagagatttagggaaggaagcagtaagtgagaacttttattctatttactcctgcacgtttaaatattgtttacagtgagtatatcaacatgtaagtgttaaaagacaataagctactagtgatttttaatataaaattaactataaaatattttaaatattagcaaataatatagcacactcatgaacctaattcccacatttgatagttgttacattttgccatgtttgtttaaaggtctaagtcataaaatcttataaagctaaaccccacccttctctttctcctctctctccaggataattactgttttatagtttgtggatatcattcccttacttgtgtttatacttttaccaagtgtgtatgtattcaaaaaacagttgttttgtgattttaaaatgtaaatgaatggcgttatgctccatgtattctgcaacttttcatcatacattaggttttggcgatttagccataatttggcatgaattcaggtcttttaagttttattccattgtaagaataaacaagtttgttcattcatgtctc

SEQ ID NO: 6779 - DNA, 3000 bp, Homo Sapiens
  NM_181706
gacttccggcggaagaagaagccggtccggagttctggccgacagcaggcgaggagtgggtagcagcgcctatgtgaagttagctaatctgagaaggcccacttctggttccatggatgatggcggttgagcagatgccaaaaaaggattggtacagcatcctgggagcagacccatctgcaaatatatcagacctaaaacaaaaatatcaaaaactcatattaatgtatcatccagataaacaaagtacagatgtaccagcaggaacagtggaggaatgtgtacagaagttcatcgaaattgatcaagcatggaaaattctaggaaatgaagagacaaaaagagagtatgacctgcagcggtgtgaagatgatctaagaaatgtaggaccagtagatgctcaagtatatcttgaagaaatgtcttggaatgaaggtgatcactctttttatctgagttgcagatgtggtggaaaatacagtgtttccaaggatgaagcggaagaagttagcctgatttcttgtgatacatgttcactaattatagaactccttcattataactaaaattgttcacaacttgaaatgctttaactgtggtattgagacatgatgagaagccgttgagctttgtccattcaaggaaatggattatttgtcagcccgattatttgcaaagaaaatatacaattatcaagcagagaccacctcagattaatagagaatgaatataattatttatttgtatttataatttatatttacaagttgtcacaaaaatagatttgattatatttggtgaattcccatctgagaactttattatgtcatttttttccatgacacaaaataagaattttcttaatatgagcatgtctcctcttttcagtgggtaacagtatcatcatattcctttatagttactaagtttctggtctaaccgataacgtttctagttgctaaagttatggggctgttgtacacctagaatctttgtgaataatgtgaggccagttcttccataaggaaggctggttatggatattcataaggttatttcaaagttaataaagacaaagtggcaactgtagaaagtgttgcctccaatcttggtccgtatttccaaagcttgtaaacactgccatcttcaaatttaaatgtaatttaggaaatggaagcttttaattttaatttcttttttctaagacagagtctcactctgtcgcgccagctggagtgcagtgccatgatctcaggtcgctgtaacctccgtctcctgggttcaagtgattctccagcctcagcctcccgaatagctgggattacacgtgcccaccaccatgcccagctaatttttgtatttttagtagagatggggttccaccatgttggccaggctggtctcaaactcctgacctcaggtgatccacctgcctcgacctcccaaagtgctaggattacaggtttgagccaccgtgcctggcctaagttttgttaatagagatgggatttcatcatgttggctaggctggtcttgaactcctggcctcaaatgatccgcccacctcaacctcccaaagtgctgggattgcaggcgtgagccaccatgcctggccagaagcttttttaaaaataatgacttggaagttggtgcattatttccccttttattttggagtgttgatataatattggggccaggcatggtggctcacatctgtaatcccagcactttgggagactaaggcaggcggatcacctttggtcaggagttcaagaccaccctggccaacatggtgaaaccccatatctactaaaaataatttttttaaaaattagccagtcacgttggtgtctgcctgtggtcccagctactcgggaggctgaggcacaagaatcacttgaacccaggaggcagagtgagccgaggttgtgccactgcactgcagcctgggctacagagagcaagactctgtctcaaaaaaaataaaataaaataaataaaaaaagatatagtattaatgcctgtatttatgaagacagggccattgcactgctgctatgctgaaatgaacttttataaagtattattgactatagccaactacagatggcatatgccttaaagatgcatttttctatgtatttaatattttgtgtacagtaaaagtcagaactcatttaaagaactttaagggatcctttagaaacatttttacttaatttcaaatgagtgggctgagcatgtagactagcagctttttatcaaacctggcattgtcaggttgaacttataaatacgaatagttactactctgacttgtaaatgtagctgctaaagtatgaggtatatttaagaagaatagattagtttcattatacctataagaacaagaattcaaaagtgaggtagtcatccaggttccccctcccacaatatttttgtatcataaaatttagatgacttttttgggttacatttttatccatatattttgaactaacagaacttggcagaatgtgtgttgaatattctttacatttaacaattaaaaacaactaaaactgaatagcaaatagtttattggtaagtacacggtttcaacgggagtaataaattcacatgaaaaggagacaataatcaagtcaaaagaataaatgcttactaatcatcagaaaatctgtggccattagggctggcacgtaaaaatccaaaatcactcagaggccaaatctgtaaaatcaaaatgaggttgaagacaattagtgaaagtaatgttatagtatcatcatattcccttttgctatctgtcccttttctctatgccagataaacactttctccttactcatcaatcaagaataaaattttctacatcaaagtaagacttgagaaaataaacttatgtgtatatatgtttaaactccaaagtttgggacattcaaacaatgtacatgaaattatatgtgtgtggtgtgtgaataaatatgtatgaatata

SEQ ID NO: 6780 - DNA, 3266 bp, Homo Sapiens
  NM_181708
ggcttccggttccgccacggcccagaggctgtgttgaggctaatggcggtgcccacggaactggatggagggagtgttaaggagaccgcagcggaagaggaatcgcgagttctggcacctggcgccgccccgttcggaaattttcctcattattctcgcttccaccctccggagcaacggctccgcctcctgcccccggagctgcttcgacagctctttcctgagagtcccgagaacgggccgattctggggctcgacgtggggtgtaactccggggatctgagtgtggctctatacaaacacttcctctccctacctgacggggaaacctgctcagatgcctcaagagaattccgtctcctctgctgcgacatagatccagtcctggtgaagcgagccgaaaaagaatgtccttttcctgatgccttgacttttatcaccctggacttcatgaatcaaaggacccggaaggttctcttgagctctttcttaagccaatttggacgttcagtttttgacattggcttctgcatgtcaataaccatgtggattcatctgaatcatggagaccatggcctatgggagttcctggcccatctttcctccctctgccactacctccttgtggagccccaaccctggaagtgttaccgggcagctgcaaggcgtctccgaaagctgggactccatgattttgaccacttccactcccttgccatccgaggtgacatgcccaatcagattgtgcagatcttgacccaggatcatggcatggaattaatatgttgctttggcaacaccagttgggacagaagccttctgctcttcagggcaaaacaaaccatagagactcatccaatccctgaatcactgatagaaaaagggaaagaaaagaacagattaagtttccagaagcagtgagatgggagggcaagaagaccaagaaagatattgaaagggttttatattgagaattatgttcattctccttaattccttaacaatcaggcagccgcaaaacctggcaggagcttttggtaaaatgtccaaggcacataattgaaagaatcagtatctgttccccattgtttggaacaaatcttgaggagaatgaatctgtggagtgatgagctaggatatctggattgagatggcctaggaaaagtggtcctggttatgggttatggagagggctgcttttggggattatttataaagatcagactaggctagtcttaaaatatgtcagttcctgggctctctgaatcctacctggtttcttcaggcttctggacttgctaggcctgcctttgggcaaaaccttagtaattcaggtctggaatggggcttaggaatctattttctgtttttttgtttgtttgtttttgcattcttctattgtaatatatacataaaatttaccattttaaccgtttttaagtacagtttttcagaacgtggaaatcccatcaaaaattggattaaaaaattaaaagataaattgataatttttttaaaagtatacaattttgtgatattaagtacatttcacaatgaggcatctatttttaacagctcccccagatgattctgaggcaagcagaggtagaccatactttgagtgcttacggttccattcagtccttctctatgtatttttcctggggtgagttcttccctatggttttaacaactacctacatgcggccgggcgcggtggctcacgcctgtaatcgcagcactttgggaggccgaggcgggtggatcacgaggtcaggagatcgagaccatcccggctaaaacggtgaaaccccgtctctactaaaaatacaaaaaattagccgggcgtagtggcgggcgcctgtagtcccagctacttgggaggctgaggcaggagaatggcgtgaacccgggaggcggagcttgcagtgagccgagatcccgccactgcactccagcctgggcgacagagcgagactccgtctcaaaaaaaaaaaaaaaaaaaacaaaaaaaaaaacaactacctacatgcttatggtccccaaatatattggtagcccgacatccacagttccagactagcatttttcctgttttgtcattatatcccttagttcttaggtacatcagaatcaacagatctcaaaagcaagctcactaccctcattcaaaacctagtcctatctcatttgatagtaatcattgcttatgctagaaacctcagttgattttctcacttacactcccccacattgaaatgctctcaaagtccagcagcaaattctatcaattacatgtaagtttcattccatacatgtgtccggtgcctggtgggaggttcctatattaaagtcatctaccttccatccattgtctgccttacagccacagtttactcatctgtacaacgaaataacaccactttccttttcctatgcccaaatgagctaaggatgtgaaggtattttgcagaatatagagtgataaagaaaaataaggtgctattacactgtgtgagcatgccgcagaccacaactgcacttgttagactggaggcttatgagaaaaacatctcaccttgtagaaaacatgcatcttactatctctgataacttgtttttcaggatgatgaagtaataaggagtccagcttcagtgctacagagcattttaaaggaagcagtgttgggagggagggatatggaactaatggaaatgaggctagtttatgatggtctcagttatcacagtagatacagagctgagtttacccacaagatcttaatttaggaacactttgaaaccctgtaaccctgctgggtgctctctcctctcactccaccaaggcagcgcacagaaacatacatggggctgtggtaggatgaataatggtcccccaagatgtccacctcctttagcaaaaggggctttgcaaatgagattgaggatcttcagatagggagattaatctggatgatcagaatataccctaagtgcaatcatcagtgttcttataatagggaggcagagggagagctgaccacagtaggagatgtaatgacaaaagcaagaggttggagtgatatgaagaagggctgcaagtcaaggaatgcaggtggcttctagaagttagaaaaagcaagaaaatgtattctcccctgaagcctccagaaggaacagccctgccaacaccttgatttcagatttaatctccagagctgtaagagaataaatcagtattttaaaccaaaaaaaaaaaaaaaaaa

SEQ ID NO: 6781 - DNA, 1950 bp, Homo Sapiens
  NM_181711
ccagccccgccgaggggagccagcgccgtctctgaggggcgtccggcgccggagccatgaccctccgccgactcaggaagctgcagcagaaggaggaggcggcggccaccccggaccccgccgcccggactcccgactcggaagtcgcgcccgccgctccggtcccgaccccgggaccccctgccgcagccgccacccctgggcccccagcggacgagctgtacgcggcgctggaggactatcaccctgccgagctgtaccgcgcgctcgccgtgtccgggggcaccctgccccgccgaaagggctcaggattccgctggaagaatctcagccagagtcctgaacagcagcggaaagtgctgacgttggagaaggaggataaccagaccttcggctttgagatccagacttatggccttcaccaccgggaggagcagcgtgtggaaatggtgacctttgtctgccgagttcatgagtctagccctgcccagctggctgggctcacaccaggggacaccatcgccagcgtcaatggcctgaatgtggaaggcatccggcatcgagagattgtggacatcattaaggcgtcaggcaatgttctcagactggaaactctatatgggacatcaattcggaaggcagaactggaggctcgtctgcagtacctgaagcaaaccctgtatgagaagtggggagagtacaggtccctaatggtgcaggagcagcggctggtgcatggcctggtggtgaaggaccccagcatctacgacacgctggagtcggtgcgctcctgcctctacggcgcgggcctgctcccgggctcgctgcccttcgggcctctgctcgccgtgcccgggcgtccccgcggaggcgcccgacgggccaggggcgacgccgacgacgccgtctaccacacgtgcttcttcggggactccgagccgccggcgctgccgcccccgccgcccccggcccgcgccttcggcccgggccccgccgagacccctgccgtggggccgggccctgggccgcgggccgcgctgagccgcagcgccagtgtgcggtgcgcgggccctggcgggggcggaggcgggggcgcgccgggcgcgctctggactgaggctcgcgagcaggccctatgcggccccggcctgcgcaaaaccaagtaccgcagcttccgccggcggctgctcaagttcatccccggactcaaccgctccctggaggaggaggagagccagctgtaggggcgggggcgggcagggaggtatttatttatttattcgcaacagccagcgctaaaagagggggaggccgagccaagaggaccccaggagcccagagcagcgggagagggtccttcctagcctcggcccgccgggtcggttcctggctggtgtctgctgagggagtggggggcccagccccttctcttctcccccgccaaaccacagtgggagctggggcagggggagagccaggcaatcgggggccaaagatgggggtgctcgcctacagtctgcatctgtagtgccttgtggggtatccaggaacaccctcccagcaggggatgggaaccctgtcccatgaagccctctcctcagctttacttgctcccccgcccttagccttggggagaaatggcccgtggtgggctgaccccccaccctccacacacacagttccatgacccagcgggcccccaggggcatcaggtgctggtcctcctccctcctggcctcgacccctaagggcttcgcccctcccaggggcctgtaactaagtcgggtcctgccaggcagggggcctgtgttctgtgccccttgggagacaggaactggcgagttcaggtggggtggggacagcacagactgttccaccgttgtgcatattgttgcttctgaaccacaaactgtataaatggatggttttttgacaaaaaaaaaaaaaaaa

SEQ ID NO: 6782 - DNA, 2989 bp, Homo Sapiens
  NM_181719
cgggcgggaggagccgctcgccggttttgccgcctccgcctttgccttcgcagccgcctccagtgttgtacattataaaccggggctgctgatgaggagtggggaactggctctctggaacgtgtgacagcaggcagaagggggcaatttgcatatttctccaaagaaccatccagaacctgagcagcctgtcttcagacagagagaggcccacggctgtttcttgaaatctggcgctgggaatggccatgtggaacaggccatgccagaggctgcctcagcagcctctggtagctgagcccactgcagagggggagccacacctgcccacgggccgggagctgactgaggccaaccgcttcgcctatgctgccctctgtggcatctccctgtcccagttatttcctgaacccgaacacagctccttctgcacagagttcatggcaggcctggtgcagtggctggagttgtctgaagctgtcttgccaaccatgactgcttttgcgagcggcctgggaggtgaaggagcagatgtgtttgttcaaattttactgaaggaccccatcttgaaggacgacccgacggtgatcactcaggaccttctgagcttctcactcaaggatgggcactatgacgcccgggccagagtcctcgtttgccacatgacctccctgctccaagtgcccttggaggagctggatgtccttgaagagatgttcctggagagcctgaaggaaatcaaagaagaggaatctgaaatggccgaggcatcccgaaagaagaaagaaaaccggaggaaatggaagcgttatctcctgataggcctggcgactgtcggaggcggaacggtgatcggtgtgactggaggtctagctgcaccccttgttgccgctggagcagcgacgattattggcagcgccggggcagcggctctgggctcagcagccggcatagccatcatgacctcgctgtttggtgcagctggagctggcctgacaggatacaagatgaagaagcgagtgggagccattgaagagttcacgtttctgcctctgacggagggcaggcagctgcacatcaccatcgccgtcacggggtggctcgcttctggcaaataccgcaccttcagtgccccgtgggctgccctggcccacagccgtgagcagtactgcctggcctgggaagccaagtacctgatggagctcggcaatgccctggagaccatcctcagtggtctcgccaacatggtggcccaggaggccctaaagtacacagtgttgtctggcattgtggctgccctgacctggccagcctcactcctcagtgtcgccaatgtcatcgacaacccctggggggtgtgtctccatcgatcagcagaggttggcaagcacctggcccacatcctgctctcccggcagcaggggcgacgacctgtcaccttgattggcttcagcctgggagccagagtcatctacttctgtctgcaggagatggctcaagagaaagattgccaaggaatcatcgaggacgtcatcctgctgggtgcgcctgtggagggagaagccaagcattgggagcctttccggaaggtggtgtccgggaggatcatcaacggctactgcaggggagactggctgctgagtttcgtgtaccgcacatcctcggtgcagctccgtgtcgccggcctacagcccgtgctgctgcaggacaggagggtggagaacgtggacctgacctctgtggtcagcggccacctggactatgccaagcagatggatgccatcctgaaggccgtgggcatccgcaccaagccaggctgggacgagaaggggctcttgctggccccaggctgcctgccctccgaggagcctcgccaggcagcagctgccgcctcatcaggcgagaccccccaccaggttgggcaaacccagggtcccatatccggagacacctccaaattggccatgtccacagaccccagccaagcccaggtgccagtagggctggaccagtctgaaggggcctcccttcctgctgctgccagccctgaaaggccccccatctgcagccatggcatggaccccaacccactgggctgccccgattgtgcctgcaagacccagggccccagcacggggctggactgaccacagcaggggacctgagccgtcttccccagtctccatatgcagctctctcttataccctcgggttcctcccaggagctctggaggtacaggatttccacaggcctctttcctaaatggaaggaattggaactgaaagggaaaggaaatggaaggaaggggaatttggaggagagaacacgcccacccttgggaagctgcctgtccccagaggagccccaccagggagcagctgccccctcatcagagacctgcagagtcaaccaagcacaggttagagtcccaggaccggaaaccaactgtgggctttctgtacttctcatagctttggagtctggctgtccatcaggaggtcccgagggctctctggggcctgaggctcccacaccagctctcccctggcctcaataaaaccaggtgcatgcctgttcttccatccacactccagggctgcccaccagctgacaggcaccatcaactggcagcaacagagcaggcgcaggtacaaagaaggcagctcactcctgctcttaggagatccaatcagatctgccctgtacagccatgtaggctgtgcgctgcataactccagggacatgagtcacacagacacaatgtgagtgtgctcccccgtcatgcaacatctggacaccactaacagagcatggtgaatacatgctgaattgcattcagtatggctgtgaactaggcctggggacaagaatgaattttacatggaaagaatttcctgtagcaggaacagaggggataacaacagcaataaataataataagaagaagctaccacttcttgagcatgtaccacaaaaaaaaaaaaaaaa

SEQ ID NO: 6783 - DNA, 3888 bp, Homo Sapiens
  NM_181720
gcaaagatgctctaacaggaagtgggttaaggagctgcactgcttcctgccccctaaagctgagcggggcgaggagggcgagtgccaggctgggccacgagacacaggacacaatttcttgccagggtcctggtagcttcctcttcaacagccacttccgtgtggccggggccccaggggcaggagctgctgcccgttgcccaggccaccctccacccccaattgggagccctgcccccctggggccgggccaagcccagcagctggctgggatcccatgggggactggtagggcacaggtcttgggggatagaggtgaccgggccagtgccctggggctctggccatgaagtctcggcagaaaggaaagaagaagggcagcgcaaaggagcgggtttttgggtgcgacttgcaggagcacctgcagcactcaggccaggaggtgccccaggtgctaaagagctgtgcagaatttgtggaggagtatggagtggtggatgggatctaccgcctctcaggggtctcctccaacatccagaagcttcggcaggaatttgagtcagagcggaagccagacctgcgtcgggatgtttacctccaagacattcactgcgtctcctccctgtgcaaggcctatttcagagaactgccggatcccctgctcacttaccggctctatgacaagtttgctgaggctgtaggagtgcaattggaacctgagcgcttggtcaagatcctagaggtgcttcgggaactccctgtcccaaactacaggaccctggagttcctcatgaggcacttggtacacatggcctcattcagtgcccagaccaacatgcatgctcgcaacctggccatcgtgtgggctcccaacctgctgaggtctaaggacatagaggcctcaggcttcaatgggacagcggccttcatggaggtgcgggtacaatccatcgtcgtggagttcatcctcacacacgtggaccagctctttgggggtgctgccctctctggtggtgaggtggagagtgggtggcgatcgcttccagggacccgggcatcaggcagccccgaggaccttatgcccaggccactgccttatcacctgcctagcatactgcaggctggcgatggacccccacagatgcggccctaccatactatcatcgagattgcagagcacaagaggaaggggtctttgaaggtcaggaagtggaggtctatcttcaatttaggtcgctctggccatgagactaagcgtaaacttccacggggggctgaggacagggaggataaatccaacaaggggacactgcggccagccaaaagcatggactcactgagtgctgcagctggggccagtgatgagccagaggggctggtggggcccagcagcccccggccaagcccattgctgcctgagagcttggagaacgattctatagaggcagcagagggtgaacaggagcctgaggcagaagcactgggtggcacaaactctgaaccaggcacaccacgagctgggcggtcagccatccgggctgggggcagcagccgtgcagaacgctgtgctggtgtccacatctcagacccctacaatgtcaacctcccgctacacatcacctctatcctcagtgtgcccccgaacatcatctctaacgtttccttggccaggctcacccgtggccttgagtgccctgctctacagcaccggccaagccctgcctctggccctggccctggccctggccttggccctggccccccagatgaaaagttggaagcaagtccagcctcaagtcccctggcagactcaggcccagacgacttggctcctgccctggaggactcgctgtcccaggaggtgcaggactccttctccttcctagaggactcaagcagctcagaacctgagtgggtgggggcagaggatggggaggtggcccaggcagaagcagcaggagcagccttctcccctggggaggacgaccctgggatgggctacctggaggagctcctgggagttgggcctcaggtggaggagttctctgtggagccacccctggatgacctgtctctggatgaggcacagtttgtcttggcccccagctgctgttccctggactccgctggccccaggcctgaagttgaggaggaaaatggggaggaagttttcctgagtgcctatgatgacctaagtccccttctgggacctaaacccccaatctggaagggttcagggagtctggagggagaggcagcaggatgtggaaggcaggctctgggacagggtggggaagagcaggcatgctgggaagttggggaggacaagcaggctgagcctggaggcaggctagacatcagggaagaggcagagggaaccccacagccacctcagccagaggagatggagcctgaggggcagcccagtccagacggctgtctatgcccctgttctcttggcctgggtggcgtgggcatgcgtctagcttccactctggttcaggtccaacaggtccgctctgtgcctgtggtgccccccaagccacagtttgccaagatgcccagtgcaatgtgtagcaagattcatgtggcacctgcaaatccatgcccgaggcctggccggcttgatgggactcctggagaaagggcttgggggtcccgagcttctcgatcctcttggaggaatgggggtagtctttcctttgatgctgctgtggccctagcccgggaccgccaaaggactgaggctcaaggagttcggcgaacccagacctgtactgagggtggggattactgcctcatccccagaacctccccttgtagcatgatctctgcccattctcctcggccccttagctgcctggagctcccatctgaaggtgcagaagggtctggatcccggagtcgtcttagtctgccccccagagaaccccaggttcctgaccccctgttgtcctctcagcgcaggtcatatgcatttgaaacacaggctaaccctgggaaaggtgaaggactgtgattaggaccacagccctgggcaaaggggaccagcaagttgtcttgaatctccagggttcctgactagctgtctcctctgcagcatgagcagctgtagtgcccaactctataggctttggccctccagcttctctctttgactgtgggaggcactgccttggttggtttacctgaacttgtctccgacacaaagcacttatctcttaggagattcccaagaaagtcaacaagatcttgttcccagggagtgggtcattggccaaagggaacataaggtaggcagaaaacttaaaagagtttgttaaagtgaagactggagaaattcctcccttcctctgagctgtgaatctctcttcatgaaagccaaaggtagagacagggaggacagggccaggttagggccttccacacacaaacacttctagagttgcccattcctgttatgttcttggaccctaagatacctcctgtcccttttaaatccagattaagagaaacgtccaggaagagctctttgaagccctcaatatttgttggagggactggactcctctccagctccccaccctctgcctccagtcaccatgtgcaagagaggtcctgtacagatctctctgggctctcctttctcctttggaataacttgttcctatttcaggaaagggaaatggtgtcactcaggccctgggactgcttctccagccaggctggggccacaggtcccactctagtgaaggtcaatgtctcagaataaaagctgtatttttacacataaaaaaaaaaaaaaaaaaaaaaaaaaaaaaaaaaaaaaaaaaaaaaaaaaaaaaaaaaaaaaaaaaaaaaaaaaaaaaaaaaaaaaaaaaaaaaaaa

SEQ ID NO: 6784 - DNA, 4429 bp, Homo Sapiens
  NM_181722
gtggtttgatcttggctcactgcagtctcaacctctcaggctcaagctatccttctgcctcagactctggggtagctgggacaacagcctcagccaagatgtctcaccctactctctatgatgcaacaagaagcccctggggaatgtttcagtcccagtctgtactattgtcatgtgctcatcacagtctggtggaatttaaatgaccttttatcaagatggataaacgcaagtttcccagtgctggaatacagaaaatggatggacaaacagggtcttgctctgttgtccaggctggagtgcggtagtgctatcacagctgactgcatcctcaacctctcaggctcaagcagtcctcccacctcagcctcccaggtggctgagactgtacgtgcttgccacaatgcccaactaataatttggacttttcctatacatgggttccaaagggctgactgcgaaacgaagtgacctcacaatgactcaagctaccacttagtgttgattgtgatgaaatgccagctgtggcatatgccttgggagctaagtggctgctgcacttgaccactatgaagactggtgtggaagggtccttctggatgtacttgggcagggtccccaacgccagagccatggaactgtaaggagccacacagccggaggtgaatggtgttgaatgagggaagcttcatctgtgtttacagccactccccattgctcacattcctgcctgagctctgccttctctcagatcagcagcagcattagattctcataggagcatgcaccccattgtgaaccatgcatgtgagggatctacgttgcgctgtccctatgagaatctaatgcctgatgctctgtcactttctccaatattatcttcaagtgagccactcctggcccaattcctgtctcccgttggcctatagaggccaagcctctgcctcatgatggcctctgcaggtcaagctcctcctcctggttccgtctacaggcccaacacttccctcaaataaactcttctgcccagctcctgtccagctcacggcagccactgtcggcatgaaaattcctcaattcaagctctctaggcccaccttctgcctcccactggcctggacacgcccagctccaacctgacaatggtctctacaggcccagctcatcgggctctgagggacctctccaggccaagctcttacctcacggaggcttctccaggtcgtttctccctgtcttcaggcagtggtgacaggtcagctcctcctccacagtggcctcgtttgggcaggtcctgcctcttgcagcctctcaaagcccagctcctgcctctgagtggcttctgcgcacccaaatgtcctccagtcagcctgtcctggctgagctcctgcgacctggctgagctcctgcctcctgtcggcctctataaacccagcctctgctgtatggtggcttcttcaggcccagctcttcctcctggcggtgtatacaggtccaactcctgcttcccaatggactctttaggccaggctcatgccttacggcagcctttcctggcccagcttttgcctgttggcataccctccaggcccacaatgtactcagatcagccactccattcccagctcttcttcctggctgtgtctacaggcccaactgctgcctcacaacaccctcttttggcccagctcctgcccagcacctggtggcctctatatgccccagacttcttaaagtcaactttgctaggcccacctttggcctcccagcggctttgacaggaccagctcttgcctcatggcagcttcccaacgccaggtttctgcctgcattgtggcatccttgatggacccaactcttgctttatgccggccttcccacaccaagtttctgcctgcctcatggcaggatccgataggcccagctcctgcctctaatggcctggttaggctcatctcatccctcaaggtggccaccccagatgaagctcctgccttttggcagcctttagaggcccagctcatgcatctcattgcctcttgaagcccagctcattcctcaaaacggcctatccacgcccagcttttccctttggtggcttctccaggcccagaaattcctcagttcggcttcgcaaggtgaagttgctgcctccctgtgccttctccaggcccagttcttcctcccagctgggtctacagtcccatctcctgactcaaaacaacctattttggctcggctcctgcccagcacctggcggcctttgtaggcctaaagcttcctcaagtcaagcgttccaggcccagatcatgctgcccaggggccttcacaggcccagctactgcctgacgatggcttccccaggcccaggtcttgccttcccccagcctcccgaggcccagcccttgcctcacagttgctttcccagtccacgttacagcctgttacccgacggccttgacagaccaaactcttccttcacactggacagtttaggacaagctcatacgtcttccagcctctccaggtcaagctcctgcctcacactggcctctataggcccaggtgctgaatcgcaatggtctgtttaggtccatctcatgcctttctcagactctccaagcgacgatctggcctgacacttgcttctgtgggccatgtgatcactcacactggcctctttaggatcaggggatgcctctccacaggccgagatcctgcctgttgtaggccccttcaggatgcgccgctgcctgacagtggaccctccaggcctagatgttacgtgatcatggcctctgcaggtcaagaatttaaattttcgcagcctctataggccaggctactgcctcctgataatggcttctgcaggcccaaatcgtcctgaaataagcctcgccaggaacagcacgtgtgttggatgcccgaacaaccatagcttctcccgcacagtggcccatgggggccgggctcttgcctcagcctggccacctcaggcccagttcttgcctgttggcggccgctccaggcccggctcctgcccctcggcctcctctccaggcccagaactggttcccgtcggcctctccaggcccagctctcccggccacctccacgggcccagctcctgcctcacgacaaccacgttcggcccagctcctgcccagctcctggcagccgttgtaggccccaggcttccctgcgttcaggcctcccggacccaccttcggctttccggcggccctgagagacccggctcctgcctgccagcggcctctcccggcccagctgcggcctcacgtcggcctccccaggccacgtttccgcctgcctcacggcagccccggcaggcccggctcccgcctgccgggggcctcttgaggaggctcatctcgtgcccggccgcggcctccccaggccaggctcctgcctgccggcaggcgccacaagcccagctcctgcgtcccgaaggcttctctaggcccggctcgtgcctcgctgcggcctcttgaggcccagcttttcccttgtggtggcctctccaggcccagaacttcctcaagtcggcctcccccggtccagtggctgcctcccggcctcctctccgggcccagctctttgctcgcgtctgcgcccgtgggcccagctcccgtctccaaacagcctccttcgactcggctcctgcccagctcccggcggccttcgtaggcccgaagcctcctccagtccagctctccagggccgcgtcttgcctcgcctcgcctcccctcaccttgcctcacctcgcagcagcctttccaggcccagctcccgcctcccggcggccttcccctgccacgctcgtgccggcctcccggcagcctccaccagcccggctcctgcctcacgctggcccctctgggcccagctcatgcctcgcggtggcctctccgggcccagctcccacccagcctgacggcgcctcccggccccaagctgccttcctcgatgtggcccaaagtggcccaaagcgtcccaaagtaggcctcgccaggcccacctcctgcccggcgtaggccctgaggggcgcggcccctgccccatactggcctcttttgggccctctcttacaccagcccctgtctcaggattgtctcttcacgcccatcttctgcctcatagtggtcactcaaggcctcgcttttgcctgatgattgcgttttctggttttgctcttgccttgtattcccttcttcgggatacagcttttacgtcttccatggtgaacctcatcaaggagactaaatcttccctggtctgtcatttttttcacttcacaccagagtgccttgggaaaaccccatctcttcttttaaccttgagagtggatttctgacgaattgataataaattttttctctgtggtttcagtaaaaaaaaaaaaaaaaaa

SEQ ID NO: 6785 - DNA, 2701 bp, Homo Sapiens
  NM_181724
gacgggaggagggacgggaggagggagggcgggcaggcgccagcccagagcagccccgggcaccagcacggactctctcttccagcccaggtgccccccactctcgctccattcggcgggagcacccagtcctgtacgccaaggaactggtcctgggggcaccatggtttcggcggcagcccccagcctcctcatccttctgttgctgctcctggggtctgtgcctgctaccgacgcccgctctgtgcccctgaaggccacgttcctggaggatgtggcgggtagtggggaggccgagggctcgtcggcctcctccccgagcctcccgccaccctggaccccggccctcagccccacatcgatggggccccagcccataaccctggggggcccatcaccccccaccaacttcctggatgggatagtggacttcttccgccagtacgtgatgctgattgctgtggtgggctccctggcctttctgctgatgttcatcgtctgtgccgcggtcatcacccggcagaagcagaaggcctcggcctattacccatcgtccttccccaagaagaagtacgtggaccagagtgaccgggccgggggcccccgggccttcagtgaggtccccgacagagcccccgacagcaggcccgaggaagccctggattcctcccggcagctccaggccgacatcttggccgccacccagaacctcaagtcccccaccagggctgcactgggcggtggggacggagccaggatggtggagggcaggggcgcagaggaagaggagaagggcagccaggagggggaccaggaagtccagggacatggggtcccagtggagacaccagaggcgcaggaggagccgtgctcaggggtccttgagggggctgtggtggccggtgagggccaaggggagctggaagggtctctcttgttagcccaggaagcccagggaccagtgggtccccccgaaagcccctgtgcttgcagcagtgtccaccccagtgtctaacagtcctcccgggctgccagccctgactgtcgggcccccaagtggtcacctccccgtgtatgaaaaggccttcagccctgactgcttcctgacactccctccttggcctccctgtggtgccaatcccagcatgtgctgattctacagcaggcagaaatgctggtccccggtgccccggaggaatcttaccaagtgccatcatccttcacctcagcagccccaaagggctacatcctacagcacagctcccctgacaaagtgagggagggcacgtgtccctgtgacagccaggataaaacatccctcaaggctgggtgtggaggctcacacctgtaatctcagcattttgggaggccaagtgcggacatcacttgagaccaggagttccaaaccagccctggcaacattgtgagacccatctctataaaaacaaaaaacagtccactaaatcagccacattaattgggaatcatatgtcacaggtcatttgtggggcaaacatcactgcttttccatcaagggagcaaagaataagtgggagttttggaagagtttggatgagagacgccaaggtgcccagcgttcgtaaggcaacatgcagcctggcgtgaagcagtattttgaaactgcaaatggttcccttcttgtgtcctttcaatgctgaatattttagtgtcattctgcctgtgctcagagctccagcagcagaagtgtgtgtggttaattaggacacttctgtgagaggacccctgcacacattacgacaggtccctaaatgagcatttcccaaactaggttccccgaggcactctacggaaacaagatttttttttttgagacggagtctcggtctgtcacccaggctggagtgcagtggtgcaatcttggtgcaatcttggctcagtgcaatccgcctcccaggttcaagcgattctcccgcctcagtagctgggattacaggtgcccaccactgcgcccagctaaattttgtatttttagtagagatggggcttcaccatgttggccaggctggtctggaactcctgaccttcaggtgatccacctgcctctgcctcccaaagtgctgggattacaggcgtgagccaccgtgcccggcccaaactactttttaaaacagctacagggtaaaatcctgcagcacccactctggaaaatactgctcttaattttcctgaaggtggccccctgtttctagttggtccaggattagggatgtggggtatagggcatttaaatcctctcaagcgctctccaagcacccccggcctgggggtgagtttctcatcccgctactgctgctgggatcaggttgaatgaatggaactcttcctgtctggcctccaaagcagcctagaagctgaggggctgtgtttgaggggacctccaccctggggaagtccgaggggctggggaagggtttctgacgcccagcctggagcaggggggccctggccaccccctgttgctcacacattgtctggcagcctgtgtccacaatattcgtcagtcctcgacagggagcctgggctccgtcctgctttagggaggctctggcaggaggtcctctcccccatccctccatctggggctcccccaacctctgcacagctctccaggtgctgagatataatgcaccagcacaataaacctttattccggcctgaa

SEQ ID NO: 6786 - DNA, 2519 bp, Homo Sapiens
  NM_181725
gtttccggctccggtgtcatggccggctcctaccctgaaggtgcacctgcagtcctcgccgataagaggcagcagttcggaagccggttcctgagagatccggcgcgcgtcttccaccacaatgcctgggacaatgtggagtggtcggaagagcaagccgcggcggcggagagaaaagtccaggagaacagtatccagcgggtgtgccaggagaaacaagttgattatgagatcaatgcccacaaatactggaatgacttctacaaaatccacgaaaatgggtttttcaaggatagacattggctttttaccgaattccctgagctggcacctagccaaaatcaaaatcatttgaaggactggttcttggagaacaagagtgaagtacctgaatgtagaaacaatgaggatggacctggtttaataatggaagaacagcacaagtgttcttcaaagagccttgaacataaaacacagacacttcctgtggaggagaatgtaactcagaaaattagtgacctggaaatttgtgctgatgagtttcctggatcctcagccacctaccgaatactggaggttggctgtggtgtgggaaacacagtctttccaattttacaaacgaacaatgacccaggactctttgtttattgctgtgatttttcttccacagctatagaactggtccagacaaattcagaatatgatccttctcggtgttttgcctttgttcacgacctgtgtgatgaagagaagagttacccagtgcccaagggcagtcttgatattatcattctcatatttgttctttcagcaattgttccagacaagatgcagaaggctatcaacaggctgagcaggcttctgaaacctggcgggatgatgcttctgcgagattacggccgctatgacatggctcagcttcggtttaaaaaaggtcagtgtctatctggaaatttctacgtgagaggtgatggaaccagagtttacttcttcacacaagaggaactggacacgcttttcaccactgctggactggaaaaagttcagaacctggtggatcgccgactgcaggtgaaccgaggaaagcaactgacaatgtaccgggtttggattcagtgcaaatactgcaagccccttctgtccagcaccagctgagaggcacctgctgccaacacgatgcaagcccattgtgtttccgggcttttttaaaaaaaaaattgtagcactgggcgtggtgcatgcctgtaatcccagccactcaggaggctgaggcggggaggatccattgagcccagcagtccaacctgggcaaaatagtgagagaccctgtatctgaaagtaataataaaaataaaaaatataaatgaggtctcgttgatgttggacaattcaagaattcagacttgaaccttaaacctaggaaaagttactttgtatcaggattctaacaattatgcttcatatttgtgaagtcctttaaaacataattttctcaagttctttctttgagatctcaatctgtcttagcattttgtaactaataactgaaattttattcaaaggaattgtaaaccttaaaccaccaatttatttccatgtgaaaaagtgttacatatgacaagtgttttttgactgtaattgcgttaaatcttttgagaatgtaaatgccgggctaggcaattgcagttaatacatacagaggttagtgaagggcttattaagttgtaggggaagcaagctgggaagaatcagatcagatattttcctgacaaaaaaaaatgaccctacagagagcatcaaaatgtggtgttcttgttaagtaattgatcgtggtcttcgctttaatcttagttccgccaggcacggtggctcacacctgtaatcccagcactttgggaggccaaggcgggcggatcagctgaggtcaggagttggagaccagcgtggccaacatggtgaaaccccgtctctactaaagataaaaaaattagctgagtgtgttggtgggtgcctgtaatccagctacttgggagactgaggcaggagaattgcttgaacccaggaggcagaggttgcagtgagctgagattgtgccactgcactccagcctgggcaacaaagcaagactctgtctcaaaaaaataaaaataaaaaaaaaatcttagttccatggaattttaagcattgttccccctctaacctgtgtctaaagaattaaaagaatttggccgggtgcggcagctcatgcctgtaatcccaacactttgggaggctgaggcaggcggatcacgaggtcaggagatcgagaccatcctggccaacacggtgaaacctcgtctccactaaaaataccaaaaaaattagctgggcatggtggcacacacctgtagtcccctgtagtcccagctactcgggaggctgaggcaggagaatcgtttgaacctgggaggtggaggttgcagtgagccaagatcatgtcactgcattccagcctgggcaacagaggaagactccgtctc

SEQ ID NO: 6787 - DNA, 3675 bp, Homo Sapiens
  NM_181740
tttgtgttccctcaaatggcggtgtgaagagagttcgcctgagccagatcccaggtttcactgaagaaacttcttagagattcattgcacttctgagatttaatgtttacaacttggagttgtcgaccttcttataagatacattttggaagtcaaaatgaaagttttctgtgaagttttagaagagttatacaagaaggtacttcttggagccacacttgaaaatgacagccatgattacatcttttatctcaacccagcagtttcagatcaagattgttctacagccacctccttagaatgggcaaacacctgtggtatccagggcaggcatcagcccatctctgttggtgtggctcccattgctgtagcacctgtgtgtttgaagaccaactctcagatgagcggttccagagaagtaatgctccttcagttaacagtgatcaaagtgatgacaacccggatattgtctgtcaaaaccgagttccatgcaaaggagcagtacagagatgtaattaaaattctcttagaatcagccaaagtcgattctaaattaatctgcatgttccaaaattcagataaattgttatctcacatggctgcacagtgccttgcattgcttctatatttccaattgagagaaaagataaccttaagtaattcctggattgctttttgccagaaaaatctttctgaatactctgagagtaataaagcaatatactgcctctggactcttacagcaataataaaagaaatctttaaagattcatgttcacagaaaacagaaattctaaagcagttcctgactcatttcgacaccatttttgaagtgttttacaattccttattctctcagcattttgaaaactgccgggatacttctaaaatagtaaacatcctgatgtgtttcctggatttgcttgagcttctcatcgcctccagaatccacctgaagttacatttcacttgccagaggattttatttttgaaaccatcttgcatgctagaagttattacctggcctattcaggcttttgttaaaaggaaggtcatcatattcctcaaaaagtgccttctctgtaaagtgggtgaagacctctgtcgtggatctgtgcctgccttaatgccgccagaccatcatgtagcggtggacatgctggctttagctaatgctgttttgcaagctgtgaattcggggttgttgaagacactgtctgtttatgaaaaacattccttttttggaggtgatgaagttcaacctgaatgtgaacttatcactagtccagatcatgtgatccttagagcagcaagcttagttataatgaaatccttagaaatcaagtttcaaaattattcttcagcaagtgaagtgaaaggtgcgtgaccatggcccactgcagccctgaccccccttcggcccatgctattcctcctgtcccaacctgggaggtcctagcctgggagatcaaggctacagtgagccgcgacccatcgcacacctgcactccagtcctggtgcaacagatggagatcctttcagggagagagagagagagagaggagaagacagagagattaaagaaaaatatgttcactcccacttatgtgtttattgttattattgtttgttgttatttctttgttattgttgtgtttactgtttatttattttgaggcagggtcttgctctgtctcccaggctcactgcagcctcaacgttttgagctgaagtgatcctctcgtctctgtttccccaccccatttgtattaatccttcatacaattagtgtttccactaatgtagattattgaaaattagatattgaattaaagctaatatatgagaagttatattgacaaagaaattgttacatatataatttccagaatagtaactcaggagttcaaagtcttccattttacttgagaaaaatgaatagtaaatgtctctaaacaggcagcatacagattcagtgaaaagtttgaattgtgagcaatgacatcactgaattgctttggatataatttagcttttaataactacacattagttataattctgtgcagttttaatttataacactagatggcacctgttatataattcagttttaaattgtagttcaaactacctaaaacgttttttatttttgtgcttaatagtagtacttctatgctttaaacaaacaaaaaatatgtttttctgttattttgaagacaaaattatttttgcttggttgcattcttggacagacagctctggcatccgatgaagtgatcttagttgtctgctcatttatttatctgcttttagcaagaaatcacataacttttatttctaagagacagttgttaggcagttgttgcaaatagatgatgtagctgtacattttaaatgtatgctctggaatgagtcactttttttccctgagcctcagtgtcctcatttgccaaataaagatgcttcctaactgattcctgatgactttttgaaagtgaattaggataattgcatcttaaggtactttagacactatgaatttatatataggcaagatattcattcattcataaactattgcctacactttgaaattttcattttttgaagttgacttacagaggttcatgtctgagttactgaccttcttaaagcctcatcttcagccctctctgcaattacacaatccgtgcaaatggctgtctcgggttttcatagaacaagacgatgacatgctggaggctgccaaggcatcactgggcatctacttaacactgaccagaggatgtgaagccactgaaagcttgactcagggaaaagaaatgtgggaccatcacacacatgaaaatggctataatcctcactgtattttcttgttcttcttgaaaaatataggatttgattccacagttcttcttgactttttgatttcatcagaaacctgttttcttgaatattttgttagatatttaaaattactgcaaaaggactgggataattttttcaccatttgcaataactttgatgcaactgaatctaaatatgacataagtatttgtggctgtgtcccctcacttgtccaagaccaaagctccaaccaaacaataccccatcgtttgactgctcctcatagtcacagagatgtgtgtgctcggcactcctgggcttccgatgctccctctgaaccactgaaagctgtgatgtccaagggggctcacaccatgtgtgcttctagtctgtcttccccccgggcctctcaaagtctggtagattacgacagctctgacgattctgacgtggaatccacagagcagtgtttagctaacagtaaacagacatctttacaccagcaagcaactaaggagattcaggatgcagctgggacaagcagggataaaaaagaatttagccttgagcctccatcaaggcctctggttctgaaagaatttgatactgccttctcctttgattgtgaagtagccccaaatgatgtcgtctctgaagtgggaatattttacagaatagtaaaatgcttccaggaactacaagatgccatctgccgtttgcaaaagaaaaatcttttcccatataatccaactgcacttttgaagttgttaaaatacatagaggtgataagtaataaaactatgaacactttgtaaaacattgac

SEQ ID NO: 6788 - DNA, 3216 bp, Homo Sapiens
  NM_181780
gtctttctgttcactttttttcacaaaatcatccaggctcttcctactctcctctcttaccacctctctcttcttttttttttttttttagttatttcacagatgccactggggtaggtaaactgacccaactctgcagcactcagaagacgaagcaaagccttctacttgagcagtttttccatcactgatatgtgcaggaaatgaagacattgcctgccatgcttggaactgggaaattattttgggtcttcttcttaatcccatatctggacatctggaacatccatgggaaagaatcatgtgatgtacagctttatataaagagacaatctgaacactccatcttagcaggagatccctttgaactagaatgccctgtgaaatactgtgctaacaggcctcatgtgacttggtgcaagctcaatggaacaacatgtgtaaaacttgaagatagacaaacaagttggaaggaagagaagaacatttcatttttcattctacattttgaaccagtgcttcctaatgacaatgggtcataccgctgttctgcaaattttcagtctaatctcattgaaagccactcaacaactctttatgtgacagatgtaaaaagtgcctcagaacgaccctccaaggacgaaatggcaagcagaccctggctcctgtatagtttacttcctttggggggattgcctctactcatcactacctgtttctgcctgttctgctgcctgagaaggcaccaaggaaagcaaaatgaactctctgacacagcaggaagggaaattaacctggttgatgctcaccttaagagtgagcaaacagaagcaagcaccaggcaaaattcccaagtactgctatcagaaactggaatttatgataatgaccctgacctttgtttcaggatgcaggaagggtctgaagtttattctaatccatgcctggaagaaaacaaaccaggcattgtttatgcttccctgaaccattctgtcattggaccgaactcaagactggcaagaaatgtaaaagaagcaccaacagaatatgcatccatatgtgtgaggagttaagtctgtttctgactccaacagggaccattgaatgatcagcatgttgacatcattgtctgggctcaacaggatgtcaaataatatttctcaatttgagaatttttactttagaaatgttcatgttagtgcttgggtcttaagggtccataggataaatgattaaaatttctctcagaaacttatttgggagctttttatattatagccttgaataacaaaatctctccaaaactggttgacatcatgagtagcagaatagtagaacgtttaaacttagctacattttacccaatatacaaactcgatcttgcctttgaagctattggaaagacttgtagggaaaagaggtttgtgttacctgcatcagttcactacacactcttgaaaacaaaatgtcccaatttgactaaccaaccataaatacagtaatgattgtatatttcaagtcagtcttccaaaataagaaatttttgctgtgtcagtctaagaatggtgtttcttaaatgcaaaggagaaatcattttaggcttgatgtaagaaaatgaaaataataaatggtgcaataaaaatatagaatataccaattggatatagggtagatgttccacatacctggcaaacaaatgcttatatctactctgttagattgataagcaaatataggtattaatggagcagtcaacgtatagcacatttatgaggaaagtagagactcactgggtcacatagactaatggataggaatgtgacataatgctgctgaattaatatacttatgggcatctgaatagtttaaaagttagtcagaataggtatcactgggcaagtgaagatagcttaaactgcttcatgcttgacttgatagcaagttaaagtgcaattaatggaatggaggaaaacccagaatatttaattggtctgtaggggtcaatttgctttcattcaccacatctgcatcttgctgttcttcttactaaggaatcagggcaaatcatctgtagtgacatattttagtttgctaatcatttattttaaaatactgaggttgcagccacttaagagtatagcaaaagatggattcagatttttggactttccaaagtacttgagttaaactatttcaaaaatagcctataattttattcaacagtttgaggctattcgaattctcaggtgctgctactgaataatgtaatagtcttcatacaaagtggatagcaaaggttaaaatccatttcaacaaatatgtgagctgagctgctgcacaaaggaatgtgatgtgtgtgtgtgtgtgtgtgtgtgtgtgtgttaggtggggtgggtgacaacagaaatggtgcacgagaaactgatcaaattgacattatattttcagtttgcttatgaagctcaaaatactagagtaaatgggtcattaaagaaaataatatgtgaaattatggagtttagaatacaagtggggtatatatacaaaaagacaaaactgaggttttgtggtggagagattttcttaagtaacactggcattaagttttagctccttagatttgggggtgcaaatattcttttgagtcactgttattttgccaattacacctagaatttcaagcaaccaattcgagataggctgttttagccaggctgcatttgtggacaacttatgtaagaaagacatgttagaatagctgcttgtggtattcttaaaaatagaaacaggaaatatggggaggatacatttagctgtcctcttatcagatgaacacacgaaattgaacagttccttcatgattctctcaaacttaaaagcaaaatatttctgtcttatttaaaatatccttagtatgtcttatagtaaagataatgctgataatgatttcatctctaagatgtattaatatatttgtactgtttgccaaaatcacaaatcatttatgtttttattccttttcaaaatggtgtcagagacatacatgcattttcccaaatgactctacttcactattatttacatggcttatttcattagtttatagagggtttgagaaaaagaatatgtagataatttaatggtttttcacaaattttaagcttgtgattgtgctcaatgagaaggtaaagttattaaaacttatttgaaatcaaa

SEQ ID NO: 6789 - DNA, 6457 bp, Homo Sapiens
  NM_181782
atgccctgacggggggcgcagctgcggggctggcgaggcgtcgcgcgtgggaagaggcctaagacaccccgactgcggcggctgcgcacacccgatccggacgcggggccccgcgggcgcgcgcctcggagctcccgcctcctcctcttgctcctcctcggcgtacggtcctcccctgacccctccttccacccgccgagaggatgcgctccccggcgcccagcagcagaggccaccgctcccagaaatgcatgcgaccgatccccttctcccggaccccaggagccggcgcccccgccctgtagggttacgactcactgattaaaaagagggactttttcaaatactttgcacttttgattgtgtattatggataccaaggaagagaagaaggaacggaaacaaagttattttgctcgactgaaaaagaaaaaacaagccaaacaaaatgcagagacagcctcagctgtagctacaaggactcatactgggaaggaagataataatacagtagttttagagccagacaagtgcaacattgctgtggaagaggaatatatgactgatgagaaaaaaaagagaaaaagtaatcagttaaaggagatcaggcgtacagaactaaagagatattatagtattgatgacaatcaaaacaaaacacatgataaaaaagagaagaagatggtggttcagaagccccatgggactatggaatacactgctggaaaccaggacaccctaaactccatagcactgaaatttaacatcactcccaataaattggtggaactgaataaacttttcacacatactattgttccaggccaggtcctttttgtgccagatgccaactctccttccagtaccttaaggctatcatcatccagtcctggtgctactgtctctccttcatcatcagatgcagaatatgataaattgcctgatgctgacttagcacgaaaggccttgaaacccattgaaagagtcttatcgtctacttctgaagaagatgagccaggtgtggtgaaatttttaaaaatgaattgtcgatacttcaccgatggaaagggtgtggttggcggtgttatgatagtgactcctaacaacatcatgtttgaccctcataaatctgatcctctggttattgaaaatgggtgtgaggagtatggtctcatctgccccatggaagaggttgtttccattgcgctctacaatgacatttctcacatgaagatcaaagatgccttgccatctgacctacctcaggatctttgtcctctgtacaggcctggagaatgggaagacctggcttcagaaaaggatatcaacccattcagtaagttcaaatctatcaacaaggaaaaacgacagcagaatggagagaaaattatgacttcggattccagaccaatagtacctttggagaagtccacaggacatacacctacaaagccctcaggcagctctgtgtcagagaaattaaagaaactggactcctctagggagacatcccatggttctcccacagtgactaagctcagcaaggaaccttccgacacttcttctgcatttgaatctacagccaaagaaaactttctaggggaagatgatgattttgttgacttggaagaactttcttctcaaactggtggtggaatgcacaaaaaagacaccttgaaggagtgcctttctcttgacccagaggaacgaaagaaagctgagtcacaaataaacaattctgccgtggaaatgcaggtgcagtcagccctagcctttttgggaacagagaatgatgttgaactgaagggggcgctagatttagaaacctgtgagaagcaagatataatgccagaagtggacaagcagtctggttcgccagaaagccgagtagaaaacacactgaacatacatgaagatttagataaagttaaactcattgaatattacctgactaagaacaaagaagggccacaggtatctgaaaatttgcagaaaacagaattaagtgatggaaaaagtattgaaccagggggaatagacattacccttagtagttctctttcccaggcgggtgatcccataactgagggcaataaagagccagataagacctgggtgaaaaagggagagcccctcccggtaaaactgaactcttctacagaagcaaatgtgattaaagaggctctagactcctctttggaatctactctggacaacagctgtcaaggtgcacaaatggataataaatctgaagttcagttgtggctgttaaagagaattcaggtacccattgaagatatacttccttcaaaagaagaaaaaagcaagaccccacccatgttcctgtgcatcaaagtgggaaaaccaatgagaaaatcctttgccactcacactgcagccatggtccagcagtacggcaaacggagaaagcagccagagtactggtttgctgttcctcgggagagggtggatcatttgtacacattctttgttcagtggtctcccgatgtctatggaaaagatgccaaagagcaaggctttgtggtggtggagaaggaagaactgaacatgattgacaacttcttcagtgagccaacaaccaagagctgggagatcatcactgttgaagaggcaaagcgcaggaagagcacatgcagctactatgaagacgaggacgaagaggtgctgcctgtcctacggccccacagcgcgctcctggagaatatgcacatcgagcagctggcccgacgccttcctgcaagggtgcaagggtatccatggagactggcctatagcacgttagagcacgggaccagcttaaagacgctctaccggaaatcggcatcactagacagtcctgtcctattggtcatcaaagatatggataatcagatttttggagcatatgcaactcatcctttcaagttcagtgaccactattatggcacaggcgaaacttttctctacacattcagccctcattttaaggtctttaagtggagtggagaaaattcatactttatcaatggagacataagttctttagaacttggtggtggagggggacgatttggtttatggctagatgctgatttataccacggacgaagcaactcttgcagcactttcaataatgatattctttccaaaaaggaagacttcatagttcaggatctggaggtgtgggcatttgattgaaattcagactgccttaaaatataacattaaaaagactgggttcgatcagccctcctaaagctggctggaaaaagaagccccagcccagcctgcctcatcccaccccaatgcttcctttctgccatcatctcagagcatgatcacattgcagaaagattctggaaggtccatgtagagggcagacattgaagaaagaaacttaaaatccaggttgttgaaaagactttgtactcccacttcctccaaatccatacagtgaggaatcagagtgtttatagatatatgagttgaatgcaatttttatttttggtaactgtgaaaaataagatactgtggatatatacatgccttgtgtatttatcagcataattttcattaccaaaatgtacagctattatttgccatggaaaaggttagtctcatttagaaaaatcgaaagtgcacagcacttaaagggaatatatgaggtttttttttttttaaaaaaaaacttttatttattatttgtagtatattgtctgaaatgtgtcggcagttttttttcttttaatgtgtcaaatcttgaaatattaaatgtatacattttgtgctatgttttgggaacaaatctgtttgatttatatagttttatattgaattttttttgccctgattgtttagggtgataggtcttaagcagcatatatctatatatctgtatgtgggtatatagagatatatgtgtgtgtgtatgtatatgtacatatacatatatatgagtgtataattctaaatttctaaaaactcattatgaatgttcatcaatttgactattataggccagctttccatttagtcaataaaagcgtacatttttagttacttaccttgaacatattcgtgtgaaaaagaatacatcatttctcacagtcttaagttgatatttatagaaatgaatacctttgtgaacctagacttagaacaaatcctgcttttgaaaaaaaatgttttgcttcttacaaaatcatttgtgttaataacaaaaactttattttcggagtgttctttgtataacttttccaagcttttacattaacgagcaggcctctgtcttaaaagggactcagtatattaatttctgcattttttaaatcaaatgaaaaacgtcaaattggaccaattgtcttggtttcttgattcatttatttgagaaaaaaacaatacaaagaaatgcattcatatcaaaattggaatagaaaggaaaacctatttttaagatatcaacctattttcacatcataaaacatctattacataaaataaaggtccaggcatagtggctcttgcctgtaatcccagcactttgggaggccgaggcaggtggatcactcaaggtcacaagtttgagaccagtctggccaacatggtgaaaccccatctctactaaaagtacaaatattagccgactatgtggcgggcacctgtaatcccacctactcgggaggctgaggcaggagaattgcttgaatccgggaagcagaggttgtagtgagccaagatcgtgccactgcactctatcctgggtaacagcgagactctgtcttaaaaataataacaataataataataataaagacttacttaaccaatattattgattaccagacttttatgaaagccaaagactgcttgctagtaggaaaaaatttcaaataataaccaaagctgaaaaatggtctgtcataaattatttccccggtaatttttgaaaggaaaaatgtataacaagtactatttacatatctgcatttaaaaaagcaattcttagaatacttcctttacattattctcctattttagacattttgtgaaagagaacaaattgtccagtggcctcctgtcagatcaacaattattatactccttaattccatgcaaatttaaatgaatgctataaaattttaaatctgtagcctgggtgtacgtttcactcaagttctcctactgaggactcttgactaacagcatactggcagtttcaccttaacctgctcgttaaataatgtgttggtgtgagatatcaggaatgtctcatgatatcacgtttaccatttacaccatctgcaaccatatgctattaataaaatggaaaaaaacaaaatggtcattttgcatatacttcactctgacctagtttagtccatgatactataattgtgagagcatatccagatgctgtgttctctatgtaaaacagtattgtccattcagaaatgtgtgacccttcatttatggatattgactatatgtaatgcagtgctatcccaatattttcaataaaggactttatgcattcagtgattttctttcccaaagattcattcatcaggtatttactgggtaccagagtgtttatttttgtgagaggatggtgaaatatccaagactaaacaaggtccagagctcatgttttcactgctgccctggaaactccctcttcattccctgtagccaccctcctaattgtctcatcagttcacggaaactgctctcattatggttaccagagacaactcttggctgtatctaccagtctcttctaatctttctagctgtgcaatgaatgacaacctcctcctcttaacatctgtcttaacctacttcataatttccgtaagggacactttactctctgataaattttctttggcatcctgacacctagcccctagatgttgggctagatgaagaccccaagcagtcttcattgcttcataattcctcagttcataagtccatatcaaaggacttgggtgggaggaggcaaccaaatgtttcttcagactctactgaaaatgattagatgcatccccgtgctacaagccaccagagacatcctgcactattataagtatgtcttcccttaatttgatctccctctccttgatgccttttaaagttttagagacacattgatatggtttggctgtgtgtccccaccaacatctcattggaattataatccccacatgttgagggagggacctagtgggatgtgattagaacatgggggcggtttcccccatgctgttctcatgatagtgagggagttttcatgagatctgttttaaaatgtttggcagttccaccctcaccctctcttctgctgccatgtaagatgtgccttgcttcccctttgccttctgccatgattgtaaatttcctgacgcctacccagccatgtgaaactgtgagtccattaaacctcttttctttataa

SEQ ID NO: 6790 - DNA, 2952 bp, Homo Sapiens
  NM_181786
gctggttgggacccgggaaggcctccctcttaaggtctttcccacacctctgcaccttgttacctgactttcggcttcaggatccgcagcgtgcacccgcgttccatctgtcttctgagactttgcccttctccaggaagagcactcaggagaccaggaaaatggccacagggctcctgagagccaaaaaagagctggcaagcagatgaattaactcccccaagcttctagctgtgtttctactcagtgggagagatttggagtgaatcatgagggtcaaccacacagtgtctacaatgctccctacatgcatggttcacagacaaaccatgagttgttccggggctggaggaataacggcgttcgtggcattcagggatgtggctgtgtacttcacccaggaggagtggaggttgttgagccctgctcagaggaccctgcacagggaggtgatgctggagacttataaccatctggtctcactggaaattccatcttctaaaccaaaactcattgctcagctggagcgaggggaagcgccctggagagaggagagaaaatgtccactggacctctgtccagaatcgaagccagaaattcaacttagtccctcctgccctctgattttctccagtcagcaagctctcagccaacatgtgtggctgagtcatctctctcagctgttttcaagtttatgggcaggaaatcctctccacctgggaaaacactatccagaagatcagaaacaacagcaggatccattctgctttagtggcaaagcagaatggattcaagagggagaagactccagactcctgtttgggagagtaagcaaaaatggcacttcaaaggcactttccagcccacctgaagaacaacagccagcacagtccaaggaagacaacacagtggtggatatagggtccagccctgaacggagggcagatctagaggaaacagacaaagtattgcatggtttagaagtctcaggatttggagaaatcaaatatgaagagtttgggccaggctttatcaaggagtcaaacctccttagcctccagaagacacaaactggggagacaccttacatgtacactgagtggggagacagctttggcagtatgtcagtcctcatcaaaaacccaaggacacactctgggggaaagccttatgtgtgcagggaatgtgggcgaggctttacgtggaagtcaaacctgatcacacatcagaggacacactcaggggagaaaccttatgtgtgcaaggattgtggacgaggctttacttggaagtcgaacctctttacacatcagcggacacactcagggctcaagccttatgtgtgcaaggaatgtgggcagagctttagcctgaagtcaaacctcattacccaccagagggcgcacactggggagaagccttatgtttgcagggaatgtgggcgtggctttcgccagcattcacacctggtcagacacaagaggacacattcaggagagaagccttacatttgcagggagtgtgagcaaggctttagccagaagtcacacctcatcagacacttaaggacacacacaggagagaagccttatgtatgcacagaatgtgggcgtcactttagctggaaatcaaacctcaaaacacaccagaggacacactcaggggttaaaccttatgtctgcctggagtgcgggcagtgctttagcctgaagtcaaaccttaacaaacaccagaggtcacacacgggggagaagccatttgtatgtacggagtgtgggcgaggctttacccggaaatcaaccctgagcacgcaccagaggacacactcaggggagaagccatttgtatgtgctgagtgtggacgaggctttaatgataagtccaccctcatttcacaccagaggacacattcaggggaaaagccttttatgtgcagggagtgtggcagaaggtttcggcagaagcctaacctgtttaggcacaagagggcacactcaggtgcctttgtgtgcagggagtgtgggcaaggcttttgtgctaagttaactctcattaaacaccagagagcacacgcaggggggaagcctcatgtgtgcagggagtgtgggcaaggctttagccggcagtcacacctcattagacaccagaggacacattcaggagagaagccttatatttgcagaaagtgtggacggggctttagtcggaagtccaaccttatcagacatcagaggacacactcaggatagaaactttatgtgtatagggaatgtggtacagcctttagccaggagtcatacttcatcagacaccagaggacacacacagtgctgtggctttttcagccattgctagataccaaagtggagacattctgtgtgtgattatgcatgagactgtactggtaagacttgtatctccatccacctgaaggagaattgctggctcattttcaggagccctgcccttcctcactgtggatggtgggttgtggaaacccggtcaggtaatgatagtggcaggaggcagtcaaatgcccaggcagataggggtgggtacctggtgaaacccaaccttaaagctgaagacagtcccggctaaatcctcatactgaattgagaacctgtcttcccatttggtgtgctttcctccgattgatcccaacccttcacctattttacgtatacctgccctttcctaattggtttttacactgctgtgcccaccttttgagtggtgcctttgcatacttacaaatcagtcaacgtgtattcccctattctgagcccataaaagacccagactcagctgcagtgaggagagaaatcaccctgctgtgggggttggggaccactccctgcatcccctctccactgagagctgttcttttgctcaataaaattcttttctacccatcctcacccttcaaaaaaaaaaaaaaaaaaaaaaaaa

SEQ ID NO: 6791 - DNA, 918 bp, Homo Sapiens
  NM_181791
atgcctggccacaatacctccaggaattcctcttgcgatcctatagtgacaccccacttaatcagcctctacttcatagtgcttattggcgggctggtgggtgtcatttccattcttttcctcctggtgaaaatgaacacccggtcagtgaccaccatggcggtcattaacttggtggtggtccacagcgtttttctgctgacagtgccatttcgcttgacctacctcatcaagaagacttggatgtttgggctgcccttctgcaaatttgtgagtgccatgctgcacatccacatgtacctcacgttcctattctatgtggtgatcctggtcaccagatacctcatcttcttcaagtgcaaagacaaagtggaattctacagaaaactgcatgctgtggctgccagtgctggcatgtggacgctggtgattgtcattgtggtacccctggttgtctcccggtatggaatccatgaggaatacaatgaggagcactgttttaaatttcacaaagagcttgcttacacatatgtgaaaatcatcaactatatgatagtcatttttgtcatagccgttgctgtgattctgttggtcttccaggtcttcatcattatgttgatggtgcagaagctacgccactctttactatcccaccaggagttctgggctcagctgaaaaacctattttttataggggtcatccttgtttgtttccttccctaccagttctttaggatctattacttgaatgttgtgacgcattccaatgcctgtaacagcaaggttgcattttataacgaaatcttcttgagtgtaacagcaattagctgctatgatttgcttctctttgtctttgggggaagccattggtttaagcaaaagataattggcttatggaattgtgttttgtgccgttag

SEQ ID NO: 6792 - DNA, 744 bp, Homo Sapiens
  NM_181800
aaacgcgggcgggcgggcccgcagtcctgcagttgcagtcgtgttctccgagttcctgtctctctgccaacgccgcccggatggcttcccaaaaccgcgacccagccgccactagcgtcgccgccgcccgtaaaggagctgagccgagcgggggcgccgcccggggtccggtgggcaaaaggctacagcaggagctgatgaccctcatggtatatgaagacctgaggtataagctctcgctagagttccccagtggctacccttacaatgcgcccacagtgaagttcctcacgccctgctatcaccccaacgtggacacccagggtaacatatgcctggacatcctgaaggaaaagtggtctgccctgtatgatgtcaggaccattctgctctccatccagagccttctaggagaacccaacattgatagtcccttgaacacacatgctgccgagctctggaaaaaccccacagcttttaagaagtacctgcaagaaacctactcaaagcaggtcaccagccaggagccctgacccaggctgcccagcctgtccttgtgtcgtctttttaatttttccttagatggtctgtcctttttgtgatttctgtataggactctttatcttgagctgtggtatttttgttttgtttttgtcttttaaattaagcctcggttgagcccttgtatattaaataaatgcatttttgtccttttttagacaaaaaaaaaaaaaaaaaaaaaaa

SEQ ID NO: 6793 - DNA, 520 bp, Homo Sapiens
  NM_181803
aaacgcgggcgggcgggcccgcagtcctgcagttgcagtcgtgttctccgagttcctgtctctctgccaacgccgcccggatggcttcccaaaaccgcgacccagccgccactagcgtcgccgccgcccgtaaaggagctgagccgagcgggggcgccgcccggggtccggtgggcaaaaggctacagcaggagctgatgaccctcatgaacccaacattgatagtcccttgaacacacatgctgccgagctctggaaaaaccccacagcttttaagaagtacctgcaagaaacctactcaaagcaggtcaccagccaggagccctgacccaggctgcccagcctgtccttgtgtcgtctttttaatttttccttagatggtctgtcctttttgtgatttctgtataggactctttatcttgagctgtggtatttttgttttgtttttgtcttttaaattaagcctcggttgagcccttgtatattaaataaatgcatttttgtccttttttagacaaaa

SEQ ID NO: 6794 - DNA, 3573 bp, Homo Sapiens
  NM_181806
gggatagctttacggcttctgggagctgctgcttcgctgtgagaagtatccgcgacgagctatccgggaaagggccgaatgcgatcaaacctaatccgcgagacttgctaaggttctgtgctacaaattgatgtttagataaacttcagtgaaatgactcttcaggaattggtgcataaggctgcctcctgttatatggacagagtagctgtatgttttgatgaatgcaacaaccagcttccagtttactacacctacaagactgtggttaatgctgcttctgaattatcaaattttctgctgttacactgtgactttcaaggaattcgggaaattggtctctactgccaacctgggatagacttaccctcttggattttaggaattctccaagtcccggctgcttatgtacctatcgagccagattcaccaccgtcattatcaactcattttatgaaaaaatgtaatctaaagtatatccttgttgaaaaaaaacaaattaataaatttaaatcttttcatgaaacattattgaactatgatacatttacagtggaacataatgacctagtgctcttcagacttcactggaaaaatactgaggtgaacttgatgctaaatgatggaaaagagaaatatgaaaaagaaaaaataaaaagcataagttctgagcatgtcaatgaagaaaaagcagaagaacacatggatctgaggctaaagcattgcttagcctatgttctacatacatcagggactacagggataccgaagattgtcagagtgcctcataagtgtatagtaccaaatatccagcattttcgggtactttttgacatcacacaagaagatgttttgtttctggcttcacctctgaccttcgatccttctgttgtggaaatatttcttgctctatcaagtggtgcctctctgcttattgtaccaacttccgtcaagttgctcccatcaaaattagccagcgttctcttttcccatcatagagtgactgttttgcaggcaacaccaacattgcttagaagatttggatctcagcttatcaagtcaactgttttgtcagccactacttctcttcgagtattagcccttggtggtgaagcgtttccatcattgacagttctcagaagctggagaggagaaggcaataaaacacaaatatttaatgtttatggtatcacagaggtatcaagttgggcgaccatttataggattccagagaagactcttaactctactctcaaatgtgaattgcctgtacaactgggatttccacttcttggaacagtagttgaagtcagagatactaatggcttcacaattcaggaaggcagtggccaagtatttttaggtggcagaaacagagtgtgttttcttgatgatgaagtgacagtaccacttggcacaatgcgagctacaggagactttgtgactgtgaaagatggagagattttttttttgggacgaaaagacagtcagatcaaacgtcatggcaaacgtcttaacattgaacttgtgcaacaggttgctgaagagcttcagcaagtggagtcttgtgcagttacatggtataatcaggaaaaattaattctcttcatggtgtctaaagatgcttcagtaaaagaatacatctttaaagaactgcagaaatatcttccaagtcatgcagtcccggatgagcttgtattgatcgactctctaccatttacatcccacggcaaaattgatgtttctgagttaaacaagatatatttaaactacataaacttgaagtctgagaataagctcagtgggaaagaggacctttgggaaaaattacagtatttgtggaagtctactctgaatctcccagaagatcttttgagggttcctgatgagtcactcttcttaaatagtggtggagattccttaaagtccatccggctcctcagtgagattgaaaaacttgttggtacatcagtacctgggcttctggaaattattctcagcagttccattttagagatttataatcacatccttcaaacagtggttccagatgaagatgtgacattcaggaagagttgtgccacaaaaaggaaactcagcgacattaatcaagaggaagccagtggaacatctttacatcagaaagccatcatgactttcacttgccacaatgagattaatgcttttgttgtactgagcagagggagtcaaattttgtctctgaattccactaggtttttaacaaagttaggacattgctcttcagcctgtccttctgactcagtttcacagaccaacattcaaaatttgaaaggcttaaattctccagttcttattgggaagtcaaaagatccatcctgtgttgcaaaagtttctgaagaggggaaacctgcgatagggactcagaaaatggagttacatgtgaggtggaggtcagacacaggcaaatgtgtagatgcttcaccgctggttgtaatacccacttttgataagtcatctacaactgtgtacattggttcccattctcatagaatgaaggcagttgacttttactctgggaaggtaaaatgggaacagattttgggagatcgaattgaatcctcagcatgtgtatctaagtgtggaaactttattgtggtgggctgttataatggattagtttatgttctgaaaagtaatagtggagaaaaatactggatgtttactactgaagatgctgtcaaaagctcggcaaccatggatccaaccacaggactcatttacattggatctcatgaccagcacgcatatgctttagatatttatagaaagaagtgtgtttggaagtcaaaatgtggaggaactgtcttttcctctccgtgtttgaacctgattccacatcatttgtattttgctacattgggaggacttttactggctgtaaatcctgctactgggaacgttatttggaaacattcctgtggaaaaccactcttctcttccccacaatgttgctcacagtatatttgtattggctgtgtagatgggaatttactctgctttactcactttggagaacaggtttggcagttctctaccagtggaccaatcttttcatccccgtgtacctcaccatcagagcaaaaaatattttttggttcccatgattgctttatctactgttgtaacatgaaaggtcacctgcagtggaaatttgaaactacttcaagggtctatgcaacaccgtttgctttccataactacaatggcagcaatgaaatgttgctggcagcagcatctactgatgggaaagtgtggatcttggaatctcagagtggacaattgcaaagtgtttatgaacttcctggagaagtcttctcttctcctgtggtcctggaatcaatgctcattattgggtgtagagataattatgtttattgtctggatttattgggtggcaatcaaaaataatcaaatacagtccttatttgtataacaaatgtgagatatttgaaaatattttaccattatacatcatgtggacttattttatattaaagaagattatattttggctaagaaaaaaaaaaaaaa

SEQ ID NO: 6795 - DNA, 2589 bp, Homo Sapiens
  NM_181837
caatcaaggagccgtgtggctcgccactaacctctgccctgcagccgcgagggcgcgcgggaaatcccgagtgcatctggaatacgcagagtcagtaagaccatggctacgtcctcgatgtctaagggttgctttgtttttaagccaaactccaaaaagagaaagatctctctgccaatagaggactattttaacaaagggaaaaatgagcctgaggacagtaagcttcgattcgaaacttatcagttgatatggcagcagatgaaatctgaaaatgagcgactacaagaggaattaaataaaaacttgtttgacaatctgattgaatttctgcaaaaatcacattctggattccagaagaattcaagagacttgggcggtcaaataaaactcagagaaattccaactgctgctcttgttcttggtgtgaatgtcacagatcatgatttgacattcggaagtctaacagaggcccttcagaataatgtcacaccatatgtagtctcattgcaagctaaagattgtccagatatgaaacattttttgcaaaagttgatctcacagttgatggactgctgtgtagatataaaatccaaagaggaggaaagtgttcacgtcacccaaagaaagacacattattcaatggattcactttccagttggtatatgactgtcacacagaagacggacccaaaaatgctaagcaaaaaaaggactacttctagccaatggcagtctcctcctgttgtcgttatcttgaaggatatggaaagctttgccacaaaagtactacaagacttcataattatcagcagtcaacatctccatgaatttccactaatactcatttttggaatagccacatctcctattatcatccaccgattgcttcctcatgcagtatcatctctattgtgcatagaactgttccaatctttgtcttgtaaggagcacctgactacggtactcgataagctacttcttacaactcagtttccctttaaaataaatgaaaaagtattacaggttctgaccaacatctttttgtatcatgatttctcagttcaaaactttataaaaggacttcagctttctctattagagcatttctattcccagcccttaagtgtcctgtgctgtaatcttccagaagccaaaagaagaataaattttttatcaaataatcaatgtgaaaacatccgacgtctaccatcttttaggaggtacgtggaaaagcaagcttcagaaaagcaagttgcgctcttgaccaatgagagatatttgaaggaggaaacacaattattactagaaaacctgcatgtttatcatatgaattacttcctggttttgagatgtcttcataagttcacctcttctcttcccaagtatccactaggtcgacagatcagagagttgtactgtacatgtttagaaaagaacatatgggattcagaggagtatgcatcagtcttgcagctgctgaggatgttggcaaaggatgaactgatgaccatacttgagaaatgtttcaaggtttttaagtcttattgtgaaaaccaccttggcagcacagctaagagaatagaggagttcctggcccagtttcagagcctcgatgcagaaaccaaagaggaagaagatgcttctgggtcacagccaaaggggcttcagaagacagacctctatcatcttcagaagtccttattggaaatgaaggagttaagaagaagtaagaagcaaaccaaatttgaagtactcagagaaaatgttgtgaacttcattgactgtctagtgagagaataccttctgcctcctgagacacagcctctccatgaggtggtgtacttcagtgctgcccatgcccttcgtgagcatttaaatgctgctccgcgaattgccctccatactgcactcaacaatccttactattatctcaagaatgaagcactgaaaagcgaagaaggctgcattccgaatatcgccccagacatctgcatagcatacaaactgcacctagagtgtagcaggctcatcaacctcgtggactggtcagaggcttttgcaacagttgtgacagctgctgaaaaaatggatgcaaattctgcaacctcagaagaaatgaatgaaattatccatgctcggtttattagagctgtttctgaactagaacttttaggatttataaaacctaccaaacagaagactgaccatgtggcaagactaacatggggaggctgctagaaagcaaataagcaaagccagaactatcacatttagcttaagagaaaaaggtgaccagtcatatttacatatattagaggagcctgttttgttgagaagataaatgtgtaacccccattgatgtttaaccagaaaagtacattgctaaccccaaacaggcatgtatcaaaacacctgtggagtactttagactccaacaaataataatgtaactaaaactgctcacacattttactgtactttccaaagtcattactaaattgtgagtaaatcattcttgaacttagagtatgtaaatgtaataaattccgttatccaggagtataaattaaaaaaaaaaaaaaaaaa

SEQ ID NO: 6796 - DNA, 2879 bp, Homo Sapiens
  NM_181838
gcttcgcagcgtcacgccctccggggccgtggcggcgacggcggtgcgtagcttactcacaggggcggcccgtatccctccgccgccggcgcggctcggccctccctcccctggcccgccaatccccgcgcctcccgacctgcccctcggtcgggcccaccccgtgctccgacggccccaccccggcggcgcagcccgcccgcccgcgcgtccctcggtccacctgcagcagggaggaagacaggcaatccctccggctgtccgaccaagagaggccggccgagcccgaggcttgggcttttgctttctggcggagggatctgcggcggtttaggaggcggcgctgatcctgggaggaagaggcagctacggcggcggcggcggtggcggctagggcggcggcgaataaaggggccgccgccgggtgatgcggtgaccgctgcggcaggcccaggagctgagtgggccccggccctcagcccgtcccgccggacccgctttcctcaactctccatcttctcctgccgaccgagatcgccgaggcggcctcaggctccctagccccttccccgtcccttccccgcccccgtccccgccccgggggccgccgccacccgcctcccaccatggctctgaagagaatccacaagctccctccacaaaaccgcctgagctcgggctgacagaggaagccgttttgcccgatccacaagtatatcctgagttcacttacctcttgggtggcagcacacatcggtccaccctgcttgtccagaaactgttaagagttggaagttcagaagaaaaaaaaaaggaattgaatgatctggcacgggaccctccagcacagtgttcagcaggtcctgttggagatgatatgttccattggcaagctacaataatggggccaaatgacagtccctatcagggtggagtatttttcttgacaattcatttcccaacagattaccccttcaaaccacctaaggttgcatttacaacaagaatttatcatccaaatattaacagtaatggcagcatttgtcttgatattctacgatcacagtggtctccagcactaactatttcaaaagtactcttgtccatctgttctctgttgtgtgatcccaatccagatgatcctttagtgcctgagattgctcggatctacaaaacagatagagaaaagtacaacagaatagctcgggaatggactcagaagtatgcgatgtaattaaagaaattattggataacctctacaaataaagataggggaactctgaaagagaaagtccttttgatttccatttgactgctttctatgagcccacgcctcatcttcccctgtgcacatgtttacctgatacagcagtgctgcgtgttgtacatacttggaacaacaaactagaaatactgtacttctgtaccaacattgcctcctagcagagaagtgtgtgtgtgacaagccagttctacaggcattacctaggtgtgagactaaaagcttttcttattgacttaaatttggataacagcaaggtgtgaggggggtggtgggtatggtgtgtgcttggatgggaaagaaaaggctccactcacctataggagattatttttaagtggaatccatttaaactcaaaacagttatgaaaagcaaggtgaagaacatgaagctgtgtctgtattcattttattccgaaggagctacgtcttaggtgaaagttatgaccaaccagattaaactctacccacatcctgcattttaaggtctaagtttaactggtcaacatttaaatggattggagctattagtacatcaagtgtgatgggctttgttcccaactcttttacatctccctaccccttcaacctttggcctttcagcccttctttctctcttccatattctttggtttgtatgtggtttctcagttaatacatagctaatagctcttatttttcttatgtttttaaccgcttaggtctatttggatgtaagggtgaaaattcatttgatggaaatacttgtgtatatttaaagacccaattgctcctctggagcttgtactttcaagaatgattaatctgtgtaataaactggttactacagtcattacatataattttgtgtgaataggctttttcatttttaagaagtttgtctagctgagattagtggtggattttctcccacttctgaaatgttcatttatactggttgcattttaagatcatgaaacaattccagttacattgtaaaaaggatatcttacgagtaattttattgaacaagttagaggcataagcttaagagcatttccatgaaacaacacatgcagcattccaggaacttgattgttaaattcaataagaaatttgctttattaatgaaactaagctgcatttcatcaaaaccttgtgacattcccttggtacataggacataaaacacagaggcattgctatttggtaagttaagcttctgtgattgtaattataaaagagcaacattgaccaaacctgggaaacaagagcacagtcttgtttggagagtctacataattactttgcactaacatttgcaggatgttcacacaattttaaattgtactgtatgtggctttttgaagtcttcccttgaccctagtaaaatatagcttgaaacttgtaaacaactgtgtttgccagaaacatcattcatgtgaactaggcaagttaccttttttccccccttcttttcctaattgtaaactaggccaacctgaaagccatggctgatgctctagccatcaggttctttcaaatgcatctttacactcttgcacaaaagttaaggaataaatgtccactgcttttggttttaaaaaaaaaaaaaaa

SEQ ID NO: 6797 - DNA, 2055 bp, Homo Sapiens
  NM_181839
cgctatgcagagaaagcccccctggctcttctctctcaatccataatccagcgatgctgcagctgtaaaagcattaatagaaaatcaatccacaacctcgcggggcagcgatcgtcgagcgccgtttccaggctgccttccctggggtcgggagcggccccgctccccccgtggctggcgcggaatgtggtgatccgtcccggggcggggatgacttcatgcagccggagctccgcggcgggagcggaggctgctgctggcaggtggggcgcgggccggcgcgagctgaccgagcactcggcgggcgcggcgggactgcggcccgtggcggcgtgcgcggggacctgcgctgactaggtccggggaagtccctgctatgtggatatttggtagcaatgactgatgtggaaactacatatgcagattttattgcttcaggaagaacaggtagaagaaatgcaatacatgatatcctggtttcctctgcaagtggcaacagcaatgaattagccttgaaattagcaggtcttgatatcaacaagacagaaggtgaagaagatgcacaacgaagttctacagaacaaagtggggaagcccagggagaagcagcaaaatctgaaagctaacaccccactttgaccctcgaccacacctgaaaatgtctcaaatctccaggagtatctggaatgcatttgtttccatgagtgaaaagaggaaaaagaaaatggctgtgctgcattgcaggaacctgctcattatcatgttaaaaatgagggcagaggctgtggctgcaggcagacttttccctacctctgtcattagcaatggttgaaatcatgtggcttgtgtttgggcgtcatttttgtatggatcctttcacttgatcatatgacgaaatgcttatagagagtagctccgacctagatgatgattcttcctgtagcatctggcccctcacaatgtcagaggatttaattgtgtctaattgcgaagggttgattgaaccccagagtttaaatatctctggctcaagtgttcacccagtaaaagaaagatccagaaagcactgtttttagcattacgtatctgtgtgttactgctgtgttatttacactgttttgtattgtacaatatatatgctcagcactgcccccttctctgattgcttatgaaaaacaaaatgatgtacattactgtgaatttttataccactcatttttaaaagggctgtcttttcattttagttttccatactgtggtggtgtacacaggatagaacacccttttttaaaacacagtctttccccttgctcattgtatgttgatgagttgattaagtctaacagattcatcaagactccattgctttattatagagacatttgaaaatatccattaatgtgaatatcacctgaattcagtctgtttggtgtctgcacagactggaattcaatctgtcaaatttgttttattctcaagtggagaacttctcccacataatatatatatatatatatattttaatttatgagaattttggacaattggaaaggtagaaaagaaaagccaagatcatactaaggactggaaatattttgttctatggaatcaaatttctcacaatgctgtatgatactatttaaatttggaggacaacttatcttcactaagctgaatcaggtggagaaagtaatctccttgcaatcatgtggacaccaatcacaaaagtaaagccctggtgttgtgttttcatgtcttttttcagccctctcagatccaaatgttattatgcactttttaatgtttgtaaacttttactaataattagtgtgaattgcattctgatacaataatgattatcattagaagctaacaaaattctcattaatactgtgtttgatggcctctgctgtgttttaacatcgtgcttcttatatggaaagtttttgtgagctgtgtaatccctctggtcagtattatgaaatcatttgtcagtggtaataaataaggaaccagtaatatgccaatggttcatgaattactggacaaatagca

SEQ ID NO: 6798 - DNA, 3544 bp, Homo Sapiens
  NM_181844
gagaccccgccccccttaagaagagaagccgcggcccctgcaggacgggggcctgtgtcgctatgggttcccccgccgccccggagggagcgctgggctacgtccgcgagttcactcgccactcctccgacgtgctgggcaacctcaacgagctgcgcctgcgcgggatcctcactgacgtcacgctgctggttggcgggcaacccctcagagcacacaaggcagttctcatcgcctgcagtggcttcttctattcaattttccggggccgtgcgggagtcggggtggacgtgctctctctgcccgggggtcccgaagcgagaggcttcgcccctctattggacttcatgtacacttcgcgcctgcgcctctctccagccactgcaccagcagtcctagcggccgccacctatttgcagatggagcacgtggtccaggcatgccaccgcttcatccaggccagctatgaacctctgggcatctccctgcgccccctggaagcagaacccccaacacccccaacggcccctccaccaggtagtcccaggcgctccgaaggacacccagacccacctactgaatctcgaagctgcagtcaaggcccccccagtccagccagccctgaccccaaggcctgcaactggaaaaagtacaagtacatcgtgctaaactctcaggcctcccaagcagggagcctggtcggggagagaagttctggtcaaccttgcccccaagccaggctccccagtggagacgaggcctccagcagcagcagcagcagcagcagcagcagcagtgaagaaggacccattcctggtccccagagcaggctctctccaactgctgccactgtgcagttcaaatgtggggctccagccagtaccccctacctcctcacatcccaggctcaagacacctctggatcaccctctgaacgggctcgtccactaccgggaagtgaatttttcagctgccagaactgtgaggctgtggcagggtgctcatcggggctggactccttggttcctggggacgaagacaaaccctataagtgtcagctgtgccggtcttcgttccgctacaagggcaaccttgccagtcaccgtacagtgcacacaggggaaaagccttaccactgctcaatctgcggagcccgttttaaccggccagcaaacctgaaaacgcacagccgcatccattcgggagagaagccgtataagtgtgagacgtgcggctcgcgctttgtacaggtggcacatctgcgggcgcacgtgctgatccacaccggggagaagccctacccttgccctacctgcggaacccgcttccgccacctgcagaccctcaagagccacgttcgcatccacaccggagagaagccttaccactgcgacccctgtggcctgcatttccggcacaagagtcaactgcggctgcatctgcgccagaaacacggagctgctaccaacaccaaagtgcactaccacattctcggggggccctagctgagcgcaggcccaggccccacttgcttcctgcgggtgggaaagctgcaggcccaggccttgcttccctatcaggcttgggcataggggtgtgccaggccactttggtatcagaaattgccaccctcttaatttctcactggggagagcaggggtggcagatcctggctagatctgcctctgttttgctggtcaaaacctcttccccacaagccagattgtttctgaggagagagctagctaggggctgggaaaggggagagattggagtcctggtctccctaagggaatagccctccacctgtggcccccattgcattcagtttatctgtaaatataatttattgaggcctttgggtggcaccggggccttcattcgattgcatttcccactcccctcttccacaagtgtgattaaaagtgaccagaaacacagaaggtgagatcacagctctgctggcagagattactagcccttggctctctcgtttggcttgggtattttatattatttctgtcataacttttatctttagaattgttctttctcctgtttgtttgcttgttagtttgtttaaaatggaaaaaggggttctctgtgttctgcccctgtaattctaggtctggaacctttatttgttctagggcagctctgggaacatgcgggattgtggaattgggtcaggaaccctctctggtattctggatgttgtaggttctctagcagtctagaaatggatacagacatttctctgttcttcaagggtgataggaaccattatgttgagcccaaaatggaagtaataataaatgcctcctggaggctgtgggtgtgggggattctgtatctggattccgtatcactccaagtggaggctggcaggtttttctgcaagatggtccagaatctaaaatgtcccattaatctggtcacttgggtttggctctgctgtatccatctatagtggtagagacccaccagggctcaagtggagtccatcatcctcccacgggggcctgttcttagcactgagttgatcgctccatgggggagagatcagacattccttatcagagatgatgtgaccttttctgactctgcccagtctctatgaatgttatggcctagggaagaatcatgaaactctttagcttgattagatggtaaacagtgttaacccatcctttactacagaggcatatgggtttgaatgttacctggggttctctctattgagttgagccccttcttcctttagtgggttttggacatcttctggcaagtgtccagatgccagaaccttcttttcctctagaagggatggtgcttggtaaccttaccttttaaaagctgggtctgtgacctggtcttcccatccctgcattcctgtctggaaccagtgaatgcattagaaccttccataggaaaagaaaaggggctgagttccattctgggtttgctgtagtttggttgggattattgttggcattacagatgtaaaagattgactagcccataggccaaaggcctgttctagttgaccaagtttcaagtaggattaagaggttggttgaggggtgcagtttctggtgtaggccaggtaggtagaaagtgaggaacagggttgcctcttggctgggtggagtctctgaaatgttagaagaagcgctgaagccttgattgatagttctgccccttgttgccctggggcttatctgattatgggacgagggtagaaagtaagaagcacttttgaatttgtggggtagaacttcaacaataagtcagttctagtggctgtcgcctggggactagtgagaaagctactcttctccctcttccctctttctccccatggccccactgcagaattaaagaaggaagaagggaaggcggaggagtctataagaaggaatcatgatttctatttagcagattggatgggcaggtggagaatgcctgggggtagaaatgttagatcttgcaacatcagatccttggaataaagaagcctctctgtgcaaaaaaaaaaaaaaaa

SEQ ID NO: 6799 - DNA, 2368 bp, Homo Sapiens
  NM_181873
ccctgttaggtctggagctccccacagacactgatctcagtttcccccgagagtgtgagtgtaggcctctacaggcagctgcctctggggagttggggagcctaggggttaactctagacccccctcaaccctctggaccaaagtctgtccaggaaaataggatgccggagcccaggagtcgtcagcctagcagttgcctggcctccagatgcctcccagggtcaccttccagccctgtggatggcagtggaatcaggacactcccttgaacagtgaatacgattttgccctggtcaacattggacgattagaggctgtgagcggcttgtcccgagtccagctcctccgtccagggtccctgcataaatttatccctgaggagattctgattcatggccgagacttccggctgctcagagttggttttgaggctggaggcctagagcctcaggcttttcaggtgaccatggccattgtccaagccagagctcagagcaatcaagcccaacagtattcggggataaccctgagcaaggctggccagggttctggctccagaaaaccaccaattcctctcatggagacagcggaagactgggagactgagcggaagaagcaggcagccagaggctggagggtcagcacggtcaacgagaggttcgacgtagccaccagcctcccccgttacttctgggtccctaaccgaattctggacagtgaggtcaggagagcatttggccactttcatcagggccgtggaccgcgcttgtcctggcatcaccctgggggcagtgatcttctccgctgtggaggcttctatacagccagtgaccctaacaaggaggatatcagagcagtggagttgatgctccaggctgggcattcagatgttgtcctggtagacactatggatgagctgcccagccttgcagatgtccaacttgcccacctgaggctgagggccctctgcctgcctgattcatctgtagctgaggataaatggctttcagccctggaaggaacacgatggctggactatgtcagggcttgtcttcgaaaggccagtgacatttcagtattagtgacatccagggttcgttctgtaatacttcaagagcgcggtgatcgtgatctcaatggcctcctctcttcactcgtccagctgctttcagcccccgaagcccgaacactgtttggcttccaatcactagtacagcgagagtgggtggcagctggacatcccttcctgactcggcttgggggaactggggccagtgaagaggctccggtgtttctcctcttccttgattgtgtctggcagctcctccagcagtttccagctgattttgaattctctgagtttttccttcttgctcttcatgacagtgtcagggttcctgacacccttaccttcctgagaaataccccctgggagcgcggaaagcagagcggacagttaaactcctatacacaagtctacaccccaggatactcccagcctccagctgggaactcttttaacctgcagctgtctgtctgggactgggatttacgttatagcaatgcacagatactacaattccagaatcctggctatgacccagaacactgtccagattcctggctccctagaccacagccaagcttcatggttcctggaccccccagttctgtgtggctcttctctagaggagcattgacccccctgaatcagctctgtccttggcgggacagtccttccctgctggcagtctcttctcgttggctccctcgacctgctatctcctctgaaagcctggctgaccaggaatggggtctcccctcacattggggagcttgccctttacctccagggctgctgctgcctgggtatctgggaccccagatcaggctctggagacgctgctacctgaggggaaggcctgaggtccagatgggcctctcagctcccacaatctctggcctccaggatgagctatcccatcttcaggagttattacggaaatggacaccaagaatatctcctgaggatcactccaagaaaagagatccacataccattctcaatcccactgaaattgctggcattctcaaaggccaatcccatcccttctggataaccagatgttaaatcatgagatcagagatgctgttcatcagtcccaacaagatggcctagaaatcgcattctcacctcgccttgctgctgctttaattccaagttctatttcttcccttatagttttctatgggaatgaggcggatacaggaaacaccctatctcctctgtatttttgtagtggaatttctatttaaggggctcattaaagcatagtatttatacacaaaaaaaaaaaaaaaaaaaaa

SEQ ID NO: 6800 - DNA, 3765 bp, Homo Sapiens
  NM_181877
ccattgttctcggtgccccacgggcttgagccggggtgaatctggaggggccgggccgagcccgggggcgctttcgcacgcgaagcaaccgctagagcaggacctggtctcccgagagcgggactacttgttgatatttgaggagggaagtgtcttacctgagagcctggctggagaagactgaggtccaaggcttgaagcctaagtgattgccccaggactgtggatgatggctgcagacatcccgagagtgaccactccgctgagctccttggtccaggtgcctcaagaggaagatagacaggaggaggaggtcaccaccatgatcctggaggatgactcctgggtgcaagaagctgtgctgcaggaggatggccctgagtctgagccctttccccagagtgctggcaagggcggcccccaggaggaggtgaccaggggaccacagggtgcactcggccgcctccgagagctctgccggcgctggctgagaccagaggtacacaccaaggagcagatgttaaccatgctgccaaaggaaattcaggcttggctgcaagagcatcggcctgaaagcagtgaggaggcagcggccctggtggaagacttgacccagacccttcaggacagtgattttgagatacagagtgaaaatggggagaactgtaatcaagacatgtttgagaatgaatcacgtaagatattctcggaaatgcctgaaggtgaaagtgctcagcactccgatggggaaagtgactttgagagagatgctggcatccagaggctccagggacacagcccaggtgaggaccacggggaggtggtttctcaggacagggaagttggccagctcataggcctgcagggcacctacctaggggagaagccctacgaatgtccccagtgtgggaagaccttcagccggaaatcccacctcatcacacacgagaggacccacacaggagagaaatactacaaatgtgatgaatgtggaaaaagctttagtgatggttcaaattttagtagacaccaaaccactcacaccggggagaagccctacaaatgcagagactgtgggaagagctttagccggagtgccaacctcataacccaccagaggatccacacgggggaaaagcccttccagtgtgccgagtgtggcaagagcttcagcaggagtcccaacctcattgcacatcagcgcacccacacaggagagaaaccctactcgtgccccgagtgtggaaagagctttggcaaccgatccagccttaacacgcatcaggggatccacactggagaaaagccctacgaatgtaaagaatgcggcgaaagctttagttacaactccaatctaatcagacaccagagaatccacacaggagagaaaccctacaaatgtaccgactgtgggcagaggttcagccagagttcagccctcatcacccaccggagaacccacacaggagagaaaccctaccagtgcagcgagtgtgggaaaagcttcagccgcagctctaacctggccacacaccggagaacccacatggtggagaagccctataagtgtggggtgtgtgggaagagcttcagccagagctccagtctgattgcacaccagggcatgcacacaggggagaaaccctacgagtgcctgacatgtggggagagcttcagctggagctccaacctcctcaagcaccagaggatccacacgggagagaaaccctacaaatgcagcgagtgtgggaaatgcttcagccagcgctcccagctcgtagtgcaccagcggacccacacgggcgagaagccctacaaatgcctcatgtgcggcaagagcttcagccggggctccattctggtcatgcaccagagagcccatttgggagacaagccctacaggtgccctgagtgtgggaaaggctttagctggaactcagtcctcattatacatcagcgaatccacactggggagaagccctacaaatgccccgagtgtggcaaaggcttcagcaacagctctaactttatcacacatcagagaactcacatgaaagagaaactttattgaagtggcaaagagtgaaagtgagggactggcctggagtgggagttgccacactgccccaacagtgattccctttcaaagagctgtgcttcctaaacattctggggggttttgccagagtcttccccttgctcatcctcatttccaggacactgtcattttagtggtctgagtcaagtcccgtatacattcaagaacagggcataggcgtggaaggtctggaaagttgggtctttttcccttacattgggtgacttgattggccccctctcatgattcctctgtgcctcagtttcctctttggtaaaatggggggaaatgtttctccatgtggaatggaagacagcatggcccacaacgtgggccgagtcctcagagaaatactggaaatcattggtgtggttctggttgttttgttgttttgctgccacgttgttgggctaaggtgccttcaccccaagctgttagtgttccagggcaccccaagctgtcagttagaatctgctcttctggctttggtgtcttgggctttgatttcaggtcaagatggaggggcttctccagttctgagtcacccacgtgaaggtaaagaccctttctatttccagaaagtgtcaggagcacagaaacttgaggaagtacagcctggagccagtgtcccagtgtcctttccattggtaagagttggacagggccttcaggaaaggggtaaaccgaggacatttcagtgcttgcttttgtctctgcctactgtcctgtggtagatcagctaccaggggaacacatttgttctcgtggggttttgtcctggagagtgtagtgaagtccgagagccctagctgccaacccatggtggatggtaacttctgtctcatcaagagtaaaacagtcctgcacacagcagggtgggtttgtgcctttggcccaacaggtacatagccccataatttctgaattattctatgcacttgtttccctcttcttttattttttatttgatatatgccgagctagaatcctgtcgggtagcttttgtatactaagaacattattattattattatttttgagacggagtctcactctgtcacccaggctggagtgcagtggtgccatctcagctcactgcaagctccgcctcccgggttcacgccattctcctgcctcagcctcccgagtagctgggactacaggtgcccaccaccacacccagctaatttctttttttgtatttttagtagagacggggtttcaccgcgttagccaggatggtttcgatctcctgtcctcgtgatctgcccgccttggcctcccgaagtgctgggattacaggcgtgagccagcgcacccggccaagaacattatttttaaagaagtgttaactttgaggacatatctgttccctggagatatttgggcttgaatcaggagtttgtcctacaggtgtcgcccttgatctcaggatgctaccagggctttgttctcgggatcctcgcacctggagagtgaagacgggcatgacggcaggtgaaggggtttgctgtgaaggaagaggagataaggcatttccaggaaatgggaaactgcctcctcctacacatggggcctgtgctcagaatgggcttagttcttataggatggatgctcagtattccttaataaagtagagttccattcttaaaaaaaaaaaaaaaaaa

SEQ ID NO: 6801 - DNA, 922 bp, Homo Sapiens
  NM_181879
tctctgctgatctgagtctgcctgtggcatggacctgcatcttccctgaagcatctccagggctgaaaaatcactgaccatggcaccatggtctcatccatctgcacagctgcagccagtgggaggagacgccgtgagccctgccctcatggttctgctctgcctcgggctgagtctgggccccaggacccacgtgcaggcagggaacctctccaaagccaccctctgggctgagccaggctctgtgatcagccgggggaactctgtgaccatccggtgtcaggggaccctggaggcccaggaataccgtctggttaaagagggaagcccagaaccctgggacacacagaacccactggagcccaagaacaaggccagattctccatcccatccatgacagagcaccatgcagggagataccgctgttactactacagccctgcaggctggtcagagcccagcgaccccctggagctggtggtgacaggattctacaacaaacccaccctctcagccctgcccagtcctgtggtgacctcaggagagaacgtgaccctccagtgtggctcacggctgagattcgacaggttcattctgactgaggaaggagaccacaagctctcctggaccttggactcacagctgacccccagtgggcagttccaggccctgttccctgtgggccctgtgacccccagccacaggtggatgctcagatgctatggctctcgcaggcatatcctgcaggtatggtcagaacccagtgacctcctggagattccggtctcaggtgaggaagccacagtcttctctagtacaattcagggaagccagacaggttgtggagagctttacaggcagggcagcccctgctaagaaagacaaaaaggggaaggagaacacagaaatcctagggacaca

SEQ ID NO: 6802 - DNA, 2187 bp, Homo Sapiens
  NM_181890
gggaactggcgggtagcgaggccctcctcggaatctcgtgtgaaggtggccctcctcttgggcctttaacgtctgtagatgctggagaccagcagaaaggatactgtgtgcgatgagataagcatgtgagaatgctttctaaccgaaagtgcctttcaaaagcgcctgtgtctggcagagctggtgtgagacgagacaatcctgccccgccgccgggataatcaagagttttggccggacctttgagcatacaccgagagagtgaggagccagacgacaagcacacactatggcgctgaaacggattaataaggaacttagtgatttggcccgtgaccctccagcacaatgttctgcaggtccagttggggatgatatgtttcattggcaagccacaattatgggacctaatgacagcccatatcaaggcggtgtattctttttgacaattcattttcctacagactaccccttcaaaccacctaaggttgcatttacaacaagaatttatcatccaaatattaacagtaatggcagcatttgtctcgatattctaagatcacagtggtcgcctgctttaacaatttctaaagttcttttatccatttgttcactgctatgtgatccaaacccagatgaccccctagtgccagagattgcacggatctataaaacagacagagataagtacaacagaatatctcgggaatggactcagaagtatgccatgtgatgctaccttaaagtcagaataacctgcattatagctggaataaactttaaattactgttccttttttgattttcttatccggctgctcccctatcagacctcatcttttttaattttattttttgtttacctccctccattcattcacatgctcatctgagaagacttaagttcttccagctttggacaataactgcttttagaaactgtaaagtagttacaagagaacagttgcccaagactcagaatttttaaaaaaaaaaatggagcatgtgtattatgtggccaatgtcttcactctaacttggttatgagactaaaaccattcctcactgctctaacatgctgaagaaatcatctgagggggagggagatggatgctcagttgtcacatcaaaggatacagcattattctagcagcatccattcttgtttaagccttccactgttagagatttgaggttacatgatatgctttatgctcataactgatgtggctggagaattggtattgaatttatagcatcagcagaacagaaaatgtgatgtattttatgcatgtcaataaaggaatgacctgttcttgttctacagagaatggaaattggaagtcaaacaccctttgtattccaaaatagggtctcaaacattttgtaattttcatttaaattgttaggaggcttggagctattagttaatctatcttccaatacactgtttaatatagcactgaataaatgatgcaagttgtcaatggatgagtgatcaactaatagctctgctagtaattgatttatttttcttcaataaagttgcataaaccaatgagttagctgcctggattaatcagtatgggaaacaatcttttgtaaatgcaaagctgttttttgtatatactgttgggatttgcttcattgtttgacatcaaatgatgatgtaaagttcgaaagagtgaatattttgccatgttcagttaaagtgcacagtctgttacaggttgacacattgcttgacctgatttatgcagaattaataagctatttggatagtgtagctttaatgtgctgcacatgatactggcagccctagagttcatagatggacttttgggacccagcagttttgaaatgtgtttatggagtttaagaaatttattttccaggtgcagcccctgtctaactgaaatttctcttcaccttgtacacttgacagctgaaaaaaaacaacatgggagtaataatgggtcaaaatttgcaaaataaagtactgttttggtgtgggagttgtcatgaggctgtgttgaagtgacttatctatgtgggatattgagtatccattgaaatggatttgttcagccatttacattaatgagcatttaaatgcaacagatatcatttcaggtgacttaacatgaatgaataaaagtcaatgctattggaaaaaaaaaaaaaaaa

SEQ ID NO: 6803 - DNA, 4184 bp, Homo Sapiens
  NM_182314
gtgtgtgagagtccagccttgggccagagtgccgggtctaggcctggaagcgcgaggcgggcatttcggaagagagtggcgcggcgtggggcgccgcgagggcactacgagcccaggaactgccgcgccggcccgattttccgcggctgtataaggactagcgcttcggtagccggggagctggagggaacctgatttgagatcaattcttggagaacacaaagaagtgtgatggattgaaccagctgccctttgaccctgctaacaacaacgagcccctgcagtttggtagtgccagtggccctctggtcacagaaggcctcattgagaatggaggggaatcaagcaagaaaagaaagagaacaaatactccttcagaaatgatgacagagctaagttcacagttgaggaccacacaatgcaaagagattttagatggctgtgggtctacgaaataggctatgcagccgataacagtagaactctgaacgtggattccactgcaatgacactacctatgtctgatccaactgcatgggccacagcaatgaataatcttggaatggcaccgctgggaattgccggacaaccaattttacctgactttgatcctgctcttggaatgatgactggaattccaccaataactccaatgatgcctggtttgggaatagtacctccaccaattcctccagatatgccagtagtaaaagagatcatacactgtaaaagctgcacgctcttccctccaaatccaaatctcccacctcctgcaacccgagaaagaccaccaggatgcaaaacagtatttgtgggtggtctgcctgaaaatgggacagagcaaatcattgtggaagttttcgagcagtgtggagagatcattgccattcgcaagagcaagaagaacttctgccacattcgctttgctgaggagtacatggtggacaaagccctgtatctgtctggttaccgcattcgcctgggctctagtactgacaagaaggacacaggcagactccacgttgatttcgcacaggctcgagatgacctgtatgagtgggagtgtaaacagcgtatgctagccagagaggagcgccatcgtagaagaatggaagaagaaagattgcgtccaccatctccacccccagtggtccactattcagatcatgaatgcagcattgttgctgaaaaattaaaagatgattccaaattctcagaagctgtacagaccttgcttacctggatagagcgaggagaggtcaaccgtcgtagcgccaataacttctactccatgatccagtcggccaacagccatgtccgccgcctggtgaacgagaaagctgcccatgagaaagatatggaagaagcaaaggagaagttcaagcaggccctttctggaattctcattcaatttgagcagatagtggctgtgtaccattccgcctccaagcagaaggcatgggaccacttcacaaaagcccagcggaagaacatcagcgtgtggtgcaaacaagctgaggaaattcgcaacattcataatgatgaattaatgggaatcaggcgagaagaagaaatggaaatgtctgatgatgaaatagaagaaatgacagaaacaaaagaaactgaggaatcagccttagtatcacaggcagaagctctgaaggaagaaaatgacagcctccgttggcagctcgatgcctaccggaatgaagtagaactgctcaagcaagaacaaggcaaagtccacagagaagatgaccctaacaaagaacagcagctgaaactcctgcaacaagccctgcaaggaatgcaacagcatctactcaaagtccaagaggaatacaaaaagaaagaagctgaacttgaaaaactcaaagatgacaagttacaggtggaaaaaatgttggaaaatcttaaagaaaaggaaagctgtgcttctaggctgtgtgcctcaaaccaggatagcgaataccctcttgagaagaccatgaacagcagtcctatcaaatctgaacgtgaagcactgctagtggggattatctccacattccttcatgttcacccatttggagcaagcattgaatacatctgttcctacttgcaccgtcttgataataagatctgcaccagcgatgtggagtgtctcatgggtagactccagcataccttcaagcaggaaatgactggagttggagccagcctggaaaagagatggaaattctgtggcttcgagggcttgaagctgacctaaatctctttgcctaacaacttgggatcctgaagataaatatgtgttggacaagcatagaaagtgatttatatttttaatggttttcaagtggaagttcctttgaatttgtcagttcattcctggaaaatcttttgagttaaaataaggatcctaggacagcacctcgaactacaggccctaaagagaaattgcctcaaaccacaagtgctgtaacttcctcccctttctgtcaattggttgtctttaaatattgcaaaagtcctgatgctaaacagtatttggagtgttttcagtgtctgtactactgttgtagaccttggtatttttttaaacactgttaactgaaatgttttgatgatttgtatgtgatttgtgtttctaaacttctctttacattaatgttgttactggtgaaaggcatgagagcagcactaagtcctctgtgtaactgccattgtctttccaatccccagtagaccagtaaataaataacacatcagtgtcttctagaaggtgcctgaccaggttcaccttttaaacgacaaagcatggtttgtggctttttgcaaaattactatgaaccaaaagttgacaaatgttccaaagttattttctctaacatatcacattaaagatctgtttcagaattgtaaaaagtacatctagatgtgtttacagaaagcaagtatccagtatgactggcatgtgttcatgctattcagaatcacttgtaaatagtctgcttttaaaggagggcatgttcagttttctgtgaattaaaatatgctcatgtgtgggcacacacgcacaaacacacacacgcacgcacacagtggcagaagggatttatattaatattctttcccctctggccttcttacagtctgttggtccctttgcttctgttgtcagtgtgttgaattgcaaaccgagtactgctgtaaatactatgtttacttcatgctgaatgtttgcaaagacttgatataagtattaatagtaatgaatcaatgaataaataatgagctagggtttgtgaggctttctacaaataggtcagctccacctggagtgcgaattgccagagacaccttggtagtgcccatcggcaaatcgcaatggcagcatgtgagtggaccattcagaaacttctgcttggtggaaagtaaacagagaggatggaggtttggggcgaatgtcctgaggcagagatggtctttattgtgtgtggtggtggttgtggtatttataataatgcaagcataccctcccttgagtctcaattgaagataaaagaatgtactgagcaagcaaagccaatggagagtatttcacaaaaatactttgtaaatgagatgccagtagtgttcaaagttgtatttttaaaagataaatattcctttttatacctcagttttgtgtcctgtttttaatgacttacgctctaagtaatccattagtagttatctcagttccttcctttgggttactagaatgttggaaaaagatgccaagtctgtcttgacaactggaaacagggttccacagcagcccattcgtgctgaaaactggcttccccctgaagcaccctgctgtggcaccagcaggaagctcaggttaattttacactagcttgctcactgatgcatctctcatcaatgctacggaaggctttgattcatcagtctcgggctcttggaatacctaattttaataatatctatgaaatcaagggaaactttccatttacagttatttcttgtttaaataaactaaattaatttttaggggagagcagtaggaaaaagagctaatgcatgcggggtttaatacctaggtgatgggttgaggtgcagcaaaaccaccatggcacacgttcacctatgtaacaaacctgcacatcctgcacatgtaccccggaacttacttaaaa

SEQ ID NO: 6804 - DNA, 2674 bp, Homo Sapiens
  NM_182470
cgccgcgcttcctcctgaaggtgactgcgcccgcggggacgcagggggcggggcccgggtcgcccggagccgggattgggcagagggcggggcggcggagggattgcggcggcccgcagcgggataaccttgaggctgaggcagtggctccttgcacagcagctgcacgcgccgtggctccggatctcttcgtctttgcagcgtagcccgagtcggtcagcgccggaggtgagcggtgcaggaggctacgccatcagtccccaccaagggccagtcgcccggctagtgcggaatcccggcgcgccggccggccccgggcacgcaggcagggcggcgcaggatccagggcgtctgggatgcagtggagctcagagagaggagaacggctcctcacgcctggggcctgctcttcagaagtccccagcgccgttccttccagatcaggacctcagcagccatgtcgaagccccatagtgaagccgggactgccttcattcagacccagcagctgcacgcagccatggctgacacattcctggagcacatgtgccgcctggacattgattcaccacccatcacagcccggaacactggcatcatctgtaccattggcccagcttcccgatcagtggagacgttgaaggagatgattaagtctggaatgaatgtggctcgtctgaacttctctcatggaactcatgagtaccatgcggagaccatcaagaatgtgcgcacagccacggaaagctttgcttctgaccccatcctctaccggcccgttgctgtggctctagacactaaaggacctgagatccgaactgggctcatcaagggcagcggcactgcagaggtggagctgaagaagggagccactctcaaaatcacgctggataacgcctacatggaaaagtgtgacgagaacatcctgtggctggactacaagaacatctgcaaggtggtggaagtgggcagcaagatctacgtggatgatgggcttatttctctccaggtgaagcagaaaggtgccgacttcctggtgacggaggtggaaaatggtggctccttgggcagcaagaagggtgtgaaccttcctggggctgctgtggacttgcctgctgtgtcggagaaggacatccaggatctgaagtttggggtcgagcaggatgttgatatggtgtttgcgtcattcatccgcaaggcatctgatgtccatgaagttaggaaggtcctgggagagaagggaaagaacatcaagattatcagcaaaatcgagaatcatgagggggttcggaggtttgatgaaatcctggaggccagtgatgggatcatggtggctcgtggtgatctaggcattgagattcctgcagagaaggtcttccttgctcagaagatgatgattggacggtgcaaccgagctgggaagcctgtcatctgtgctactcagatgctggagagcatgatcaagaagccccgccccactcgggctgaaggcagtgatgtggccaatgcagtcctggatggagccgactgcatcatgctgtctggagaaacagccaaaggggactatcctctggaggctgtgcgcatgcagcacctgatagctcgtgaggctgaggcagccatgttccaccgcaagctgtttgaagaacttgtgcgagcctcaagtcactccacagacctcatggaagccatggccatgggcagcgtggaggcttcttataagtgtttagcagcagctttgatagttctgacggagtctggcaggtctgctcaccaggtggccagataccgcccacgtgcccccatcattgctgtgacccggaatccccagacagctcgtcaggcccacctgtaccgtggcatcttccctgtgctgtgcaaggacccagtccaggaggcctgggctgaggacgtggacctccgggtgaactttgccatgaatgttggcaaggcccgaggcttcttcaagaagggagatgtggtcattgtgctgaccggatggcgccctggctccggcttcaccaacaccatgcgtgttgttcctgtgccgtgatggaccccagagcccctcctccagcccctgtcccacccccttcccccagcccatccattaggccagcaacgcttgtagaactcactctgggctgtaacgtggcactggtaggttgggacaccagggaagaagatcaacgcctcactgaaacatggctgtgtttgcagcctgctctagtgggacagcccagagcctggctgcccatcatgtggccccacccaatcaagggaagaaggaggaatgctggactggaggcccctggagccagatggcaagagggtgacagcttcctttcctgtgtgtactctgtccagttcctttagaaaaaatggatgcccagaggactcccaaccctggcttggggtcaagaaacagccagcaagagttaggggccttagggcactgggctgttgttccattgaagccgactctggccctggcccttacttgcttctctagctctctaggcctctccagtttgcacctgtccccaccctccactcagctgtcctgcagcaaacactccaccctccaccttccattttcccccactactgcagcacctccaggcctgttgctatagagcctacctgtatgtcaataaacaacagctgaagcacc

SEQ ID NO: 6805 - DNA, 2498 bp, Homo Sapiens
  NM_182471
cgccgcgcttcctcctgaaggtgactgcgcccgcggggacgcagggggcggggcccgggtcgcccggagccgggattgggcagagggcggggcggcggagggattgcggcggcccgcagcgggataaccttgaggctgaggcagtggctccttgcacagcagctgcacgcgccgtggctccggatctcttcgtctttgcagcgtagcccgagtcggtcagcgccggaggacctcagcagccatgtcgaagccccatagtgaagccgggactgccttcattcagacccagcagctgcacgcagccatggctgacacattcctggagcacatgtgccgcctggacattgattcaccacccatcacagcccggaacactggcatcatctgtaccattggcccagcttcccgatcagtggagacgttgaaggagatgattaagtctggaatgaatgtggctcgtctgaacttctctcatggaactcatgagtaccatgcggagaccatcaagaatgtgcgcacagccacggaaagctttgcttctgaccccatcctctaccggcccgttgctgtggctctagacactaaaggacctgagatccgaactgggctcatcaagggcagcggcactgcagaggtggagctgaagaagggagccactctcaaaatcacgctggataacgcctacatggaaaagtgtgacgagaacatcctgtggctggactacaagaacatctgcaaggtggtggaagtgggcagcaagatctacgtggatgatgggcttatttctctccaggtgaagcagaaaggtgccgacttcctggtgacggaggtggaaaatggtggctccttgggcagcaagaagggtgtgaaccttcctggggctgctgtggacttgcctgctgtgtcggagaaggacatccaggatctgaagtttggggtcgagcaggatgttgatatggtgtttgcgtcattcatccgcaaggcatctgatgtccatgaagttaggaaggtcctgggagagaagggaaagaacatcaagattatcagcaaaatcgagaatcatgagggggttcggaggtttgatgaaatcctggaggccagtgatgggatcatggtggctcgtggtgatctaggcattgagattcctgcagagaaggtcttccttgctcagaagatgatgattggacggtgcaaccgagctgggaagcctgtcatctgtgctactcagatgctggagagcatgatcaagaagccccgccccactcgggctgaaggcagtgatgtggccaatgcagtcctggatggagccgactgcatcatgctgtctggagaaacagccaaaggggactatcctctggaggctgtgcgcatgcagcacctgatagctcgtgaggctgaggcagccatgttccaccgcaagctgtttgaagaacttgtgcgagcctcaagtcactccacagacctcatggaagccatggccatgggcagcgtggaggcttcttataagtgtttagcagcagctttgatagttctgacggagtctggcaggtctgctcaccaggtggccagataccgcccacgtgcccccatcattgctgtgacccggaatccccagacagctcgtcaggcccacctgtaccgtggcatcttccctgtgctgtgcaaggacccagtccaggaggcctgggctgaggacgtggacctccgggtgaactttgccatgaatgttggcaaggcccgaggcttcttcaagaagggagatgtggtcattgtgctgaccggatggcgccctggctccggcttcaccaacaccatgcgtgttgttcctgtgccgtgatggaccccagagcccctcctccagcccctgtcccacccccttcccccagcccatccattaggccagcaacgcttgtagaactcactctgggctgtaacgtggcactggtaggttgggacaccagggaagaagatcaacgcctcactgaaacatggctgtgtttgcagcctgctctagtgggacagcccagagcctggctgcccatcatgtggccccacccaatcaagggaagaaggaggaatgctggactggaggcccctggagccagatggcaagagggtgacagcttcctttcctgtgtgtactctgtccagttcctttagaaaaaatggatgcccagaggactcccaaccctggcttggggtcaagaaacagccagcaagagttaggggccttagggcactgggctgttgttccattgaagccgactctggccctggcccttacttgcttctctagctctctaggcctctccagtttgcacctgtccccaccctccactcagctgtcctgcagcaaacactccaccctccaccttccattttcccccactactgcagcacctccaggcctgttgctatagagcctacctgtatgtcaataaacaacagctgaagcaccaaaaaaaaaaaaaaaaaaaaaaaaaaaaaaaaaaaaaaaa

SEQ ID NO: 6806 - DNA, 1609 bp, Homo Sapiens
  NM_182476
gggattggagtgctctgctccggacgcactacgtaggtgggcctgcgggagttctgagtgcgacggcgcaggtctgcaccatggcggcccggcttgtcagccgatgcggggctgtgcgtgcagctccccacagcggcccgctggtgtcctggcgcaggtggtccggcgcctcaacagacaccgtgtatgacgtggtggtgtcgggtggaggcctggtgggcgctgccatggcctgtgccttgggatatgatattcactttcatgacaagaaaatcctgttgctcgaagcaggtccaaagaaagtactggagaaattgtcagaaacttacagcaacagggtcagctccatttcccctggctctgcaacgcttctcagtagttttggtgcctgggaccatatctgcaacatgagatacagagcctttcggcgaatgcaggtgtgggacgcctgctcagaggccctgataatgtttgataaggataatttagatgacatgggctatatcgtggagaatgatgtcatcatgcatgctctcactaagcagttggaggctgtgtctgaccgagtgacggttctctacaggagcaaagccattcgctatacctggccttgtccatttcctatggccgactccagcccttgggttcatattaccctaggtgatggcagcaccttccagaccaaattgttgataggtgcagatggtcacaactccggagtacggcaggctgttggaatccagaatgtgagctggaactatgaccagtctgctgttgtggctactctgcatttatcagaggccacagaaaacaacgtagcctggcagagatttcttccctctgggcctattgctctgctcccgctctcagacaccttgagttccttggtttggtccacgtcccatgaacatgcagcagagctagttagcatggatgaggaaaaatttgtggatgccgttaactctgccttttggagtgatgctgaccacacggacttcatcgacacagctggtgccatgctgcagtatgctgtcagccttctgaagcccactaaggtctcggctcgccagctgcccccaagcgtagccagggtggatgccaaaagccgagttctgtttcctcttgggttgggacatgctgctgagtacgtcaggcctcgggtggcgctcattggggatgcagcccacagagtccatccgcttgcaggacagggtgtcaacatgggctttggggatatctccagcttggcccatcacctcagtacggcagccttcaatgggaaggacttaggttccgtgagccacctcacaggttatgaaacagaaagacagcgtcacaacactgctcttctggctgctacagacttactaaaaaggctctattctaccagtgcctccccgcttgtgttgctcaggacgtggggcttgcaggccacaaatgcagtgtctccactcaaagaacagattatggcctttgcaagcaaatgagtactcctctcctaaagaaagattacgttgatgaaaaagaacatcctgcccaggacccatcatacatattttcaagatcttatttaatttaataaacttactttacattaaaaaaaaaaaaa

SEQ ID NO: 6807 - DNA, 3075 bp, Homo Sapiens
  NM_182490
acttccgccccggaaagcgaggccgccaccatcttttgggtccgggaggattgagtcatcgggctccaatgcgtggggatgtttaccgccgtttatccgggatagagactccatcgtgctgacagcatccttttattcaccgcctccgaatttgcaaagaggaggaaggagggacttcttggcttctcccagcatagccccagttatgccatctcagaactatgaccttccccagaagaagcaggagaaaatgaccaagtttcaggaggctgtgacattcaaggatgtggctgtggtcttctccagggaggaactgcgactgctcgatcttacccagaggaagctgtaccgagatgtcatggtggagaacttcaagaacctggttgcagtggggcatcttcccttccaaccagatatggtatcccaattggaagcagaagaaaagctttggatgatggaaacagaaacccaaagaagcagcaagcatcaaaataagatggaaacactccaaaaatttgcattaaaatacctttcaaatcaagagctgtcctgctggcaaatctggaaacaggttgcaagtgaattaaccaggtgtcttcaggggaagagttcccagttattacaaggtgactctattcaggtttctgaaaatgagaacaatataatgaaccctaaaggagatagctctatttatattgaaaatcaagagtttccattttggagaacccagcattcttgcgggaatacatatctgagtgagtcacagattcagagtagaggtaagcaaattgatgtgaaaaataacctgcaaatacatgaagacttcatgaagaaatcaccatttcatgagcatattaaaactgacacagaaccaaaaccctgcaaaggtaatgaatatggcaaaatcattagtgatggctccaaccagaaattacccttaggagagaaaccccatccatgtggtgagtgtggaaggggcttcagttatagcccaaggcttccccttcatccgaatgttcacacaggagaaaaatgcttcagtcaaagctcacatctgcgaactcatcagagaattcacccaggagagaaactcaatagatgtcatgaatctggtgattgcttcaataagagctcttttcattcttatcaatctaatcatacaggagagaagtcttatagatgcgacagttgcggcaagggattcagtagcagcacgggtcttatcattcattacagaactcatactggagagaaaccctataaatgcgaggaatgtggtaaatgctttagtcaaagttcaaattttcagtgccatcagagagtccacactgaagaaaaaccatacaaatgcgaagagtgtggtaagggcttcggttggagtgttaatctccgtgttcaccagagggtccacaggggtgagaagccctataaatgtgaggaatgtggtaagggcttcactcaggctgcacattttcacatccatcagagagtccacactggagagaaaccctacaagtgtgatgtgtgtggtaagggcttcagccacaattcaccattaatatgccatcggagagtccacacaggagagaagccatacaagtgtgaggcgtgtgggaaaggctttacccgtaatacagatctgcatattcatttcagagttcacacgggagagaaaccctataaatgtaaggagtgtggtaagggcttcagtcaggcttcaaatcttcaagtccatcagaatgtccacactggggagaaacgattcaagtgtgaaacgtgtgggaagggcttcagtcagtcctcaaagcttcaaacccatcagcgagtccacactggagagaaaccatatagatgtgatgtgtgtggtaaggacttcagttatagttcaaatcttaaactacaccaagtaattcacactggagaaaaaccatataaatgtgaggaatgtgggaagggcttcagttggagatcaaatcttcatgcacatcaaagagttcactcaggagaaaaaccctataaatgtgagcagtgtgataagagcttcagtcaggccatagattttcgggtacatcagagagtccatactggagagaagccatacaaatgtggtgtctgtggtaagggcttcagtcagtcctctggtcttcaatcccatcagagagtccacacgggggaaaagccatacaaatgtgatgtgtgtggaaagggctttagatacagttcgcagtttatataccatcagagaggccacactggagaaaaaccttacaaatgtgaagagtgtgggaaaggctttggtaggagcttgaatcttcgccatcatcagagggtccacacgggagagaaaccccatatatgtgaggagtgtggtaaggccttcagtctcccctcaaatcttcgagtccacctgggtgttcacaccagggaaaaactctttaaatgtgaagagtgtggtaaaggcttcagtcagagtgcacgtcttgaagcccatcagagagtccacactggagaaaaaccatacaaatgtgacatatgtgataaggacttccgtcaccgttcacgtcttacatatcatcagaaagtccatactggtaaaaagctttagaaatgagaaatgtgttaccaacttttgtctgaatgcacatcttcaagtttttggctagtccatgctggtggtaaaccctgtaaaactactgagagtggaagggggtttgttcacacttggaatctttctaacaaatccatcaagatgataacacagaaccatgaacaggaatagaactcgtatttaggggagaaatagggctggtggctctcttggtaagatctagttaatataaatgatcacctttcattgtgaatatatgcctgaagataatgtgtggaaggatatttgccatatgctaactggttttttggccagggagagttttgggttattatcccttttctttaattttcattttatacttacagtgatcattattttcataaaagctgtaaagctatgaaaaatgaataaaattactaaaaattttctgtaaaaaaaaaaaaaaaagaaaaaaaaaaaaaaaa

SEQ ID NO: 6808 - DNA, 3627 bp, Homo Sapiens
  NM_182492
gcctagagggagaaaacttgttgaaattcagagatccccctccccctaccaatacacaccaaatcagacgcctctgaccagatctgaatttggctctcagagatttccattgtagccaggcagttggggcactttctgagtgctgcctccacctcactgtccccagcctgcctgcctccgtttccctagccctgggcctgtgccgctgtcaccatcacctgggcgccctctagtggatgaatcggattatgcacgagggggcttggagcaggattcagaaggggctcctgtccttccttgaaatgctggacgccgggatcctggaacagctcttcaggtctctgcattcctcctggcaacagccagagcctgggcgcagggggctactgttgtttgaaggctgaaggctgcagcctggtagggcactcaggagacctggcagttggctgcagggccaggtctaggggccagggcatgagggatgctctgggctggctcagccccgggcccccatgcggattgtgactgtgggggcatggccacatgatgttgaggggggatctctgaccctgaccttcttggctctgtgcatccttgaaaccagaaaggtctggaacaaatcagtgaacaatgccctaactcggggagggagccacatcctgaccccagcagcctcagaaggatccgtgtcagggttatggggcaccctgggggccccgagtctgcatgggtctccacatgcaacttctgccggaaactctgaaaaatcccaactggggggtcataggacacaatcagaaatgctgatgccactgtgtgtggatccccgggccctggggggtcaggagcatgtagaaggtgggccacagggggttcataagagaatcctgtaaccgcccctgccccccaaacttagaagcccactggagggccatgggtgaaagcttgggggggtgtcctgtggagtgggtggtggggggtctttgggtttacatgctgctgggcctgagcagcaggaccccgtccacagctgatccctgggccctgctgctcagctgctctcttgagtgttgctgtggctgccgagagagcctgagtcgagcctctcttgtgccggccgtacgctgtcaggccacgctggtgagtttggcaaggcacagatgcccagagcagagaactttccttggggatttaatatgtgcgaatcttgaggtccggcaaatctttccctcagctagagagggggtttttgagactagaatcacctcagcatcctcctgtccccagctgtgtccagcctgtctgcagggacatcctgagaggactaggctctcccctcatccacctgcgtaagtgccaccctgaagcctgtccacccatgcttggagaggcttggcctcaacctgcttagccagcagcaggcttgggcctggggtgcagcagagacccaggtggctgtggggtggttgcttcatggggtggttctgaaacgcagttggaagtgcatggacagtgccttacctgttctctgtgggaccctgtttagaaaccaggtctgagttactgggggtcatcgctacattctgatggcctagctgtgtggaggccacggtggagccccatccaaggagccagggccctgggtctagccgtgaccagaacgcatgccctggaggtgtttctcatcttgcacctgtgttgcctggtgtctcaagtggccacaaaactgtgttagctcttggtgcccctgggcttcggaaccagggtttcccttcatctcagtgacccgggagcatctgggcagtgagtaaagagggtgatttacttgatgggtacgtttggtcctgcctgggagcccccccaggcacggtcctgggacctgaagctgccctcgttggtggaggggagggagagagcttcagggatgaggtggcgttgagctgggcgggaagggtgagcccctgcaaggtggggtgggtgtgctggggacgctgagcagcacggccagcaggtgggtcttcagctcggtacccggtgggacttgtggttggggctggtgtgtggccaggagaggggctggcagaagacaagggggactgtgaggcagctcccatccagcggttgaagcctgatggcctggctctgtgcctcagttctctcatctataaaatgagaaaacagtgccagcctcccagacctgtcatgaggatgaacgagtgaccacgtagcatgggctgggtgcgtgtcacctaacattaccagcctttgcaaggagagccctggggacctggctgagtttttcccttgcctggcccactgcacctgtccccacaggagccaaggaggtcctgctgctggcccggtagacggaccaatggagggtctcgctggacacaccggacttcaccgacatcgtgctgcagctggacgacatccagcatgccatcgccatcaactatgacccaatggagggccacgtctactggacggatgacgaggtgtgggccatccgcagggcatacctggatgggtctggggcgcagacgctgatcaacaccaagatcaacgaccccgatgacatcgcagtcaactgggtggcccgaagcctctattggacccacacaggcactgaacacatcgaggtgacgtgcctcaacagcacctcccacaagatcctggtgtcagaggacatggacgagccccgtgccattgcactgcatcccgagatgggcctcacgtactggatagactggggagagaaccctgaaatcaagcgtgccaacctggacaggcaggagctgcgcgtgctggtcaatgcttccctcgggtggcccaacggcctggccctggacctgcaggaagggaagctctactggggagatgccaagacagacaagatcgaggcgatcagtgtcgatgagacgaagaggcagaccctcctgaaggacaagctcccacacattttcaggttcaccctgctgggggacttcatctactggaccgcctggcagcaccacagcatcaagcgggtacacaaggtcaaggccaaccgggacgtcatcattgaccagctgcccgacctgatggggctcaaagctgtgaacgtggacaaggtcgtcggaaccaaccctcatgcggacaggaatgggggtgcagccacctgtgcttcttcacgccccacacaacccggtttggctgccccatctagggcctggaactgctgagtgacatgaagacctgcatcatgcccaaggccttcttggtcttcaccagtagagccgccatccacaggatctccctcgagaccaacaacaacgatgtggccatcctgctctcggcgtcaaggaggcctcggccctggactttgatgtgtccagcaaccacatctactggacagacatcagcctgaaggtagcgtgggcccgaacatgcacacgtgcagcctatatgggaaaaccttccctctgtacctgcctcaaaggtttcagacatttttcttaaagcactataatatttattgtaacacaattcaagctaattaaatatgagcaagcctatttcaaaaaaaatagacgattataatgagcaaatccggtagacacacaaaaaaaaaaaaaaaaaaaaaaa

SEQ ID NO: 6809 - DNA, 1411 bp, Homo Sapiens
  NM_182498
gcgcgttcctgccccgcacacgcacgcgcgaacccttcagcttcttgttcctttgggccgcgggctgtaccaagtaaacccaggcagcgaggggcaaagcacggcgccccccgcgcgggtctcgtcgacggcccgacgcgcatagcccctcttcccacagcgctacaggactagtccgtctcgccgcgcaagcgccctaggctcttcacgccccctgcgcgctgtcctaccctacttgcgacgcaggcgcagaggctgggcgtgcagccgccgccgcagagccggagcgggggccgccggcgccgcatccctctctacctgccaacatcctgtattagagaacttgtggccggaggtgtggctgtggagagctggccggggagggacgctgctcagctgctgctctgctcctgtctcctgtcccctcccccggtcatgacagagacccgtgagccagctgagactgggggctacgccagcttggaagaagatgatgaagacctttccccaggccccgagcattcctctgattcagaatacactctctcagagccggactccgaagaggaagaagatgaggaggaggaggaagaggagaccactgacgatcctgaatatgatcctggctacaaggtgaagcagcgccttggcgggggccgtggtggcccatcccgccgggccccccgtgcagcccagcccccggcccagccttgccagctctgtggccgctcaccccttggggaggccccaccgggaaccccaccctgccggctctgctgccctgctacagccccccaggaagcaccagcccctgaaggcagggccctcggggaggaagaggaggaaccacctcgggctggggagggccgaccagctgggcgggaggaggaggaggaagaggaggaggagggaacctaccactgtacggaatgtgaggattccttcgacaacctgggggagctgcacgggcacttcatgctgcatgcccggggtgaggtgtaggcagagcccccatacggggagcttggcagaaggggtggggtgggaggagggggctgaggaaattggggttgtgacagtggtcatgggggatggggtactgccggtctgtgttgtcttagaagtagatgtgtgatggccagaataaaagccaaaatctgtatctgtgtgtgttggttcagagtgtgtgtgtgtgtgtgtgtattcccgcccgtgtgtgtgtttgtgtgtgtgtgtgtgtgtgtgtattccccctgggctccttcttggggaaccttggggtcttttgggaaagataacatttactgcgtgcttgtattcgatgaggtttccatgtatttacttacagaccccataatgtaaaggctctaataatagaattttgtttctcactcaaaaaaaaaaaaaaaaa

SEQ ID NO: 6810 - DNA, 745 bp, Homo Sapiens
  NM_182533
ctcacttccgcccggcgcgggcttggatggaggcggcgcggaggccgcggctggggttgagccgccggaggccgcccccggcgggcgggccttctggcggccgcccctggtttctcctggggggtgatgagcgggagcggctctgggccgagctactgcgcacggtgagcccggagctgatcctggatcacgaggtgccttcactgcccgccttcccaggacaggagcccaggtgcggcccggagcccactgaagtcttcactgtcggacccaagaccttttcctggacaccctttccgccggacctgtggggcccgggccgttcctaccggctgcttcacggggcaggagggcacctggaatcccccgccaggtccctgccccagcgcccggcacctgatccctgcagggcccccagggtggagcagcagccgtctgtggagggtgccgcggccctgcgcagctgccccatgtgccagaaggagttcgcccccaggctgacccagctggatgttgacagccacctggcccagtgcttggccgaaagcacagaagacgtgacgtggtgagcgccatccaagagccctgcgcagagtgcggcgcccggacacgctctcccccgccagcagccccgcctctcggctcccccgccagcagccccgcctctcggctcccccgcatgcgcattaaagcagggcgggctcctgtctgtctctgtgttgtgatgaaaaaaaaaaaaaaaaaa

SEQ ID NO: 6811 - DNA, 1915 bp, Homo Sapiens
  NM_182538
gcttcatcctggcgccagtctcaggccaagagctgcaggctggcatggctggggggatgtcagcggagtgccctgagcctgggccaggaggtctgcagggccagtccccagggccaggcaggcagtgtccccctcccatcacgcccacctcctggagcctgcccccgtggagggcctacgtggctgccgccgtcctctgctacatcaacctcctgaattacatgaactggttcatcattgcaggagtgctgctggatatacaggaggttttccagatcagtgacaaccatgctggtttgcttcagactgtcttcgttagctgcctgctgctgtctgcacctgtgtttggctacctgggcgaccgacatagccgcaaggctaccatgagcttcggtatcttgctgtggtcaggagctggcctctctagctccttcatctccccccggtattcttggctcttcttcctgtcccggggcatcgtgggcactggctcggccagctactccaccatcgcgcccaccgtcctgggcgacctcttcgtgagggaccagcgcacccgcgtgctggctgtcttctacatctttatccccgttggaagtggtctgggctacgtgctggggtcggctgtgacgatgctgactgggaactggcgctgggccctccgagtcatgccctgcctggaggccgtggccttgatcctgcttatcctgctggttccagacccaccccggggagctgccgagacacagggggagggggccgtgggaggcttcaggagcagctggtgtgaggacgtcagatacctggggaaaaactggagtttcgtgtggtcgaccctcggagtgaccgccatggcctttgtgactggagccctggggttctgggcccccaagtttctgctcgaggcacgcgtggttcacgggctgcagcctccctgcttccaggagccgtgcagcaaccccgacagcctgatttttggggcactgaccatcatgaccggcgtcattggggtcatcttgggggcagaagctgcgaggaggtacaagaaagtcattccaggagctgagcccctcatctgcgcctccagcctgcttgccacagccccctgcctctacctggctctcgtcctggccccgaccaccctgctggcctcctatgtgttcctgggccttggggagctgcttctgtcctgcaactgggcagtggttgccgacatcctgctgtctgtggtggtgcccagatgccgggggacggcagaggcacttcagatcacggtgggccacatcctgggagacgctggcagcccctatctcacaggacttatctctagtgtcctgcgggccaggcgccctgactcctatctgcagcgcttccgcagcctgcagcagagcttcctgtgctgcgcctttgtcatcgccctggggggcggctgcttcctgctgactgcgctgtacctggagagagacgagacccgggcctggcagcctgtcacagggaccccagacagcaatgatgtggacagcaacgacctggagagacaaggcctactttcgggcgctggcgcctctacagaggagccctgaggtccctgcctacactcgtcctgcctgcaagcctcccgttggtccccacagcagcagtgcctcggttcctctttggctgtcctcggggactccggctgaggcacatctgccacttttgaattcccggctggagagctggcaggaccctgtggctgggctgggaatggagctgtcagcactctgcgtgggaggcctgggcctgtgcctgcatcccgctcaaggctgccccagcctggggtctccagcctggctgctgctgggccctgaataaagagaggccagtacaaagcccatggattttgggcctgtaaaaaaaaaaaaaaaaaaaaaaa

SEQ ID NO: 6812 - DNA, 3852 bp, Homo Sapiens
  NM_182540
agaagttgtcagtgaacagagacggcgctcagtctggggcgagcgctctagtgagcgcggacggatgcttaggcagtagtcctggcagcggcagtagtggtggcagcagaagagaggaagggggagggccccgagggctacacacgctcacactttcaagttcccttggagggagaggaggtggggctgcagaaagaggaggccaggagcggtcccatccgtcccgtcccgtcccgtctccccctcttcctcttgctccttgccccccggctctgcgagagttgagggttcaggtggccgtacgcggcagtgagggcaagagggccgggagagtggggagcggaggcaggagtgcgggggaagatgcccatcctgctgttcctcatagacacgtccgcctctatgaaccagcgcactgacctgggcacctcttatttggacattgccaaaggcgctgtggagttattcttgaagctgcgcgcccgggacccggccagccgtggagacaggtacatgctggtcacctacgacgaacccccgtactgcatcaaggctggttggaaggaaaatcatgcaacattcatgagcgaactaaaaaatcttcaggcttctggactgactactctcggtcaggctctaagatcctcatttgatttgttaaatctcaatagattaatatctggaatagacaattatggacaggggagaaatccattttttttagaaccatctattttaattaccatcacagatggaaacaagttaacaagtactgctggtgttcaagaagagctccatcttcctttgaattcccctctgcctggaagtgaactaaccaaagaaccttttcgttgggatcaaaggttatttgccctggtgttgcgtttgcctggagtggcttctaccgaaccagagcaactagggagcgtaccaactgatgaatctgccatcacacagatgtgtgaagtcacaggaggtcgctcctactgtgtgagaacacaaagaatgttgaatcaatgtttagaatctctagttcaaaaagttcagagtggtgtagttattaattttgaaaaaacaggaccagatccacttcctattggagaagatggacttatggattcatccaggccaagcaattcatttgctgctcagccatggcatagttgtcataaactcatttatgtacgacctaactctaaaactggtgttcctgttggacattggccaattccagaatctttttggccagatcagaatttaccttcactacctccacgaacatctcatcctgttgtgaggttctcctgtgtagattgtgagccaatggtaatagacaaacttccttttgacaaatatgaacttgaaccttcgcccttaactcagtatatcttggaacgaaagtctccccatacctgctggcaggtatttgttactagcagtggaaagtacaatgaacttggatatccatttggttatttaaaagccagtacaactttaacttgtgtaaacctctttgtgatgccttacaactacccagttttacttcctcttttagatgacttgtttaaagttcacaagcttaagccaaatctgaagtggcgacaggcttttgacagctacttaaaaactctgcctccatactacctattaaccaaactagagtcagaacgaatactagcatcagtggggaagaaacctccccaggaaattggaattaaagtgaaaaatcattctggaggtggcatgtccttgactcacaataaaaattttagaaaactattgaaagaaatcacaggggaaactgcacttagactgacagaattgaacaccaaagaatttgctggcttccaaattgggctcttaaacaaggatttgaaacctcagacatacagaaatgcttatgatattccccgtagaggtcttttagaccagctgaccagaatgagatccaatctgctgaaaacgcacaagtttattgttggacaagatgaagattcccttcatagtgttccagttgcacaaatgggtaactatcaggaatatctgaagacattggcttctccactgcgagagattgatccagaccaacccaaaagactgcatacttttggcaatccgtttaaacaagataagaagggaatgatgattgatgaagcagatgagtttgtagcagggccacaaaacaaagtgaaacgtccaggggaacccaacagtcctatgtcatctaagagaaggcggagtatgtccctgctgttgaggaaaccacaaacaccacctactgtaactaaccatgtgggcggaaagggaccaccctcagcctcgtggttcccatcttatccaaacctcataaaacccacccttgtacatacagatgctactatcattcacgatggccatgaggagaagatggaaaatggtcagatcacacctgatggcttcctgtcaaaatctgctccatcagagcttataaatatgacaggagatcttatgccacccaaccaagtggattctctgtctgacgacttcacaagtctcagcaaagatgggctgattcaaaaacctggtagtaacgcatttgtaggaggagccaaaaactgcagtctctccgtagatgaccaaaaagacccagtagcatctactttgggagctatgccaaatacattacaaatcactcctgctatggcacaaggaatcaatgctgatataaaacatcaattaatgaaggaagttcgaaagtttggtcgaaaatatgaaagaattttcattttgcttgaagaagtgcaaggacctctggagatgaagaaacagtttgttgaatttaccatcaaggaagccgcaaggtttaaaagacgagtcctaattcagtaccttgagaaggtactagaaaaaataaattcccaccaccttcacaacaacattagtcacatcaacagcagatcatcatgttagtgcaaagaccagtgagaaaaaaatgacaagttttctgtgctgtaggatggaacaggatattgttgaagcctcctggaatgtttgagtcaagggaattgctttccagatgctaagaagcagcagtggggcttttgaattttatgattatctggcagtgaaagctgggcttttgccttaataattttttaaagtatgaattgttttgttttgttttcctcaattgaggaagctgatgttattaattcacaggctaaattcggtaaacaccactgcccctaccacgggtaatgagaggtcactcacttgaactttgccattccaggcattctcagagtggcgaggggccacctgcaagtggagcacaacttggtgctcttactgtgtccttcagaaagaataggtgtacagaaaggaaatggcaatcttatgtgtgctgaacaaagttttcaacaattcctagttgtgccttttaaaccatgcaatattcaggatagtttgaatcaaagaagtaagaagctgctatttgggtaacttatttctctgtgggaaggggcagggagagtcaccaaacaatctacctccaactctcttctcttttgtctagagacattacaaagtgcacttgaggctgcccccaacctctgacatttgttcttgcatgtgatgatagaaagtcttcagatggacttatacattctgtgctttggaagcacaagaagaacaaaatatgtgtatatttcctttaatgtttatacaaaagtttatatggagcagtattgttatgtttgtatgaatttgcaaaaattaaagtgtacaaagagattttgattttgcatatataaaataaatcattttattgattttcacaagttcattaatgctggataaatttctacttaaaaa

SEQ ID NO: 6813 - DNA, 1048 bp, Homo Sapiens
  NM_182547
ggcgcttaggggctgaggcgcgatggcaggtgtcggggctgggcctctgcgggcgatggggcggcaggccctgctgcttctcgcgctgtgcgccacaggcgcccaggggctctacttccacatcggcgagaccgagaagcgctgtttcatcgaggaaatccccgacgagaccatggtcatcggcaactatcgtacccagatgtgggataagcagaaggaggtcttcctgccctcgacccctggcctgggcatgcacgtggaagtgaaggaccccgacggcaaggtggtgctgtcccggcagtacggctcggagggccgcttcacgttcacctcccacacgcccggtgaccatcaaatctgtctgcactccaattctaccaggatggctctcttcgctggtggcaaactgcgtgtgcatctcgacatccaggttggggagcatgccaacaactaccctgagattgctgcaaaagataagctgacggagctacagctccgcgcccgccagttgcttgatcaggtggaacagattcagaaggagcaggattaccaaaggtatcgtgaagagcgcttccgactgacgagcgagagcaccaaccagagggtcctatggtggtccattgctcagactgtcatcctcatcctcactggcatctggcagatgcgtcacctcaagagcttctttgaggccaagaagctggtgtagtgccctctttgtatgacccttcctttttacctcatttatttggtactttccccacacagtcctttatccgcctggatttttagggaaaaaaatgaaaaagaataagtcacattggttccatggccacaaaccattcagatcagccacttgctgaccctggttcttaaggacacatgacattagtccaatctttcaaaatcttgtcttagggcttgtgaggaatcagaactaacccaggactcagtcctgcttcttttgcctcgagtgattttcctctgtttttcactaaataagcaaatgaaaactctctccattaaaaaaaaaaaaaaaaaaaaaaaaaaa

SEQ ID NO: 6814 - DNA, 3599 bp, Homo Sapiens
  NM_182552
aaaggggcgtgggcgcgaggggcggcgggctagtaaccatagcggctcgcgtgggtcggctggcaagtaaccatagcggcgagcgtggggcggagtgtggctcggtagtcctctgcgtgccctcctgggagctgggtgctgtgagtcctcccctagcgggctggtctcggcgcggagtcggcgccgaacccgagctgctgctctggggcgtgtgcctagggcgcagggctggagcgcgggggctgcgcggttgctcgcggctccgctgaggtctctaggaaagggggcgatttgagggttccgccgtgaccgcttccaacggcggacacgcgcgctctggaccagagccgttgcccgctgtctcgtcacccgaagcctcctcctgacgccgtgctagtgcgagggtctccaggggaattcggggcacaagtcgggccggagcatccgggcggccgcttgagatcggcgctttgagaactgagcgcatgtggagttcggaggaaaagggctcagattgaagatggaaaatccccaagacattttctcaagtaatggtggctgtctaagtgatatagttatagaaaaatacctggttgaatccaaggagtctgtgtctcatgttcagcttgcttgcagcatgcaggactgtgctttccctttggatggaactgaactttgtatatggaacactaaggatccttctcatcagcttctaatcctacgaggacaccatcagccaattactgctatggcttttggaaataaagtgaacccacttctaatctgctcagcatcactggattatgttataatgtggaacctggatgaatgtagagagaaagtacttcaagggctggtccctcgagggactgtcatgggctcgcttttgggaaaggtgctgtgtttacagttgagcctggatgatcatgttgttgccgtgtgtgctggaaacaaaatattcatgctggatattgagcagcgattttctgtgacatacatagaacgtcctgatgttaataaccgccacaaagtcccaccaccgaccttcctgcacacattctctcagactcaggctgttcgggccgagctgcagggccacctgggcccggtgactgcggtggagttctgtccctggcgagcaggcaccctcatctcggcgtctgaggacagaggctttaaggtctgggaccattgtacaggatcattaatatacagttcatctgtgttatcagcatatcctcttctcagtttattcattgatgcagaaagcaggcagctggtcaccgggtgtgctgacggccagctttggatcttcagtttgatggatggacaccattatcgtcgtgtggcacgggttgacctaaggaagaagacagagactttctccacaagaagggttaagtctgggctgtgcagccagccagaagaaagccagcttccctctacaagtgctctgggaaaaggagagcaggttgaagtaacatttcctgtactgagacttgcaccctgtgatctctcactcatcccaaattctgcatgtggatgtctttcttctgagaacacccgatgtgtgtggatcggaagctcagtgggcttattcgtatttaacctggcaaacctggaagtggaagctgctttgtattacaaggatttccagagcctcagcatcctgctggccggatcgtgtgccctgaggaaccgcactgcggatcaaaaggtgctgtgcttgctggcctccctctttggcgggaagattgccgtgttggagatcaacccggccgcgctagtcagggctcagcagtgccccagcatggggcagagcctctcggtgccagccagctcctgtgtcctaccgacctctccactgtatctgggaattgccaaggagaagagtaccaaggctgctagtgaacagcgacgtgctgcacggaacgtcatgaaggaccaacgcctggttttccatagtaaagttaggtcatctggttatgcgtcagcaccacatgtaactatgttttcaccaaagaccaacatcaagagtgaggggaaaggatcttcaaggagcaggagcagctgcgcacgggaggcataccccgtggagtgcgctgtgcccaccaagcccggcccccaggtcgctgccgcccccacctgcacacgtgtatgctgcatccagtactcaggagatgggcagtggctggcctgtgggttggccaaccatctgttactcgtttttgatgccagcctgactgggacacctgctgtgttttcaggtcacgacggggcagtgaatgccgtgtgctggagccaggaccggaggtggctgctctctgcggcccgggacgggaccctgcgaatgtggtcggctcgtggggcagagctcgcactgcttctgggcaaagacatgttttctaaacctatacagtctgcacagttctattatatagatgcctttatattgttatcttctggccctgaatttcagctactgaggtatcacattgacacttgcaaagatgagattaagagatataaacagaagagcaagtccaagctgatttgcaggctctccacgacgggtgcagtagacatgaccagtttatcggcagtcaacgacttttattcccacatcgtactcgcagctggccggaacaggaccgtggaagtgtttgacctcaacgccggctgcagtgcagcggtgatagcggaagcccactcacggcctgtccatcaaatctgccaaaataaaggttcatcatttacaacccaacagcctcaggcttataaccttttcctgaccacggccattggcgatgggatgagactgtgggacctgagaaccctgaggtgtgagcgccactttgaagggcatccaacccgcggctatccatgtggaatcgctttcagtccttgtggacgattcgcggcttgtggggccgaggacagacacgcttacgtgtatgaaatgggctcaagcacgttttctcaccggctggctgggcacacagacactgtcactggagtggccttcaacccatcagcgccccagatggagtctcgctctgtcgcccacgctggagtgcagtggcacgatctcggttcactgcaacctccgccttccaggttcaagcaattcttctgcctcagcctcccgagtagctgggattacagcttgccacagctaccttggatggtaaactccagctctttctagctgagtaaccactgacctgtgagctgggtccaggaatgctgtgaggaacaacttaaaagtaagaagtagtggttcatccatcagggggccagaagcagcaactgtttttcatattttgagacttgcctcagatttcccccgtttgcaagctcctcccctctgtgtgtgccatgtcagagttttatgtctttctgctcctcaaaagggatccccttcattgggaaaatggaaatggcgtccagtacttctgcacagaatttggtaaagttaaaacaaaatatctttcaataaaacataatatagtatttgtttgataattagagttggaagaaaaaagagagaatttcttttgggcagtgaaaataaagcagttaacagtcctaaaaaaaaa

SEQ ID NO: 6815 - DNA, 7740 bp, Homo Sapiens
  NM_182557
cgtgcgtgtcttgtctccctgtccacgtgtgagctgtgagtgtgtgtgagtcagagttcgggtgtctgtgggtctctgagcctctgctggcagcacccggggctcgccaagctcttgccggctggcgcgcgcccagcccctggcgggacttgtccgtgtgtctgtccgcgcgcggggcctggagaagcacgctgcagtcctgtccgcctcccgctcgctgcctcgctggctgtcgctcgctcgctctgcctctccgcccgggctctgccgaagggggcggggtgggggtgcagggcggggggaggggaggctcctgcattcttgcggtcggggaggaatccgagccagcgttactggtctccagaagagcccagctgcagccccggggccccgccaggcctctcgctgcccgcccgggcctgctgggatgggcacgggctaggcctcgagctggggacggggcggggcgtggccccaaccccgggccccctccacggctggagcgctctgggggtggggcacgaggggtaccccaccctgggtgaggggcgcgtctgggagcaggaatccctcagggggccaggggagacctcacagccgccccacacggcacctttgctacctagccttttagtgaattctgtctctgccgcccgtcggggcggaggcttgctggagactgcaagccccctgagggcaaggtgcgggagggatggggacagggctggcctccaggatcgagaccccatctcgtaatcctctttttccagtgccaccccaccctatccagctccctagtcccagggctgttgggtcctcccttctcccctccccctctgacaccccctccccaagtcacgagttttctctttggggcttgttgctgcagtccgtgctccagtaccgagtacctggctgggccctgggcacgcacaggggccgtagccccactgtgtgtgggagccatgaggatcctggctaacaagacaaggttaccccaccccaggaggagagaagctccagggagcccgccgctgtccccccgcggtcattgcccccctgccccagccaagccaatgcacccagaaaataaattgaccaatcatggcaagacagggaatggcggggcccaatctcagcaccagaatgtgaaccaaggacccacctgcaacgtgggctcgaagggcgtgggggcggggaaccatggggccaaggccaaccagatctcgcctagcaactcaagtctgaagaacccccaggcaggggtgccccctttcagctcgctcaagggcaaggtgaagagggaccggagtgtgtctgtggactctggagagcagcgagaggctgggaccccatccctggattcagaggccaaagaggtggcgccgcggagtaagcggcgctgtgtgctggagcggaagcagccgtacagtggggacgaatggtgctctggaccggacagtgaggaggacgacaagcccattggggccacccacaattgtaatgtagcagacccagccatggcggccccacagctgggtcccggccaaaccacccaactgcccctcagcgagagcagcgtgccaggcgccccgcacggccctcctcctggccttcggcctgatgcccctgggggcgggggcgggggcgggggcgtccccggaaagcctccctcgcagttcgtatatgtcttcaccacccacctggccaacacggctgcagaggcagtgctgcagggccgggccgactccatcctcgcctaccaccagcagaacgtgccccgggccaagcttgaccaggcccctaaagtgccccccaccccagaaccgctacccctgagcacgccgtcagcaggcaccccgcagtcccagccacctccactgccgccgccgccacccccggcccctggcagtgccccgcctgctctgcccccagaggggcctcctgaggacagcagtcaggacctggcccccaactcggtgggagctgccagcacaggtggtgggactgggggcacccaccctaacaccccgacggctaccaccgccaacaaccctctgcctcctggaggagaccccagcagtgcccccggccctgccctgctgggggaggcagccgcccctggaaatgggcagcgcagcctggtgggctcagagggcttgtccaaagagcagctggagcatcgggaacggtccctccagacgctgcgagacattgagcgactgctgctccgcagcggagagactgagcccttcctcaaggggcccccaggaggagcgggtgaggggggcccaccagcacaagccccccctcccccccagcagccacccacggcccctcccagcgggctgaagaaatatgaggaacccttgcagtccatgatttcacagacacagagcctagggggccccccgctggagcatgaagtgcctgggcaccccccgggtggggacatggggcagcagatgaacatgatgatacagaggctgggccaggacagcctcacgcctgagcaggtggcctggcgcaagctgcaggaggagtactacgaagagaaacggcggaaagaggaacagattgggctgcatgggagccgtcctctgcaggacatgatgggcatggggggcatgatggtgagggggcccccgcctccttaccacagcaagcctggggatcagtggccacctggaatgggtgcgcagctgcgggggcccatggatgttcaagatcccatgcagctccggggcggacctccctttcctgggccccgtttcccaggcaaccagatacaacgggtacctgggtttgggggcatgcagagtatgcccatggaggtgcccatgaatgccatgcagaggcccgtgagaccaggcatgggctggaccgaagacttgccccctatggggggacccagcaattttgcccagaacaccatgccctacccaggtgggcagggtgaggcggagcgattcatgactccccgggtccgtgaggagctgctgcggcaccagctgctggagaagcggtcgatgggcatgcagcgccccctgggcatggcaggcagtggcatgggacagagcatggagatggagcggatgatgcaggcgcaccgacagatggatcctgccatgtttcccgggcagatggctggtggtgagggcctggcgggcactcccatgggcatggagtttggtggaggccggggcctcctgagccctcccatggggcagtctgggctgagggaggtggacccacccatggggccaggcaacctcaacatgaacatgaatgtcaacatgaacatgaacatgaacctgaacgtgcagatgaccccgcagcagcagatgctgatgtcgcagaagatgcggggccctggggacttgatggggccccagggcctcagtcctgaggagatggcccgggttcgggcccagaacagcagtggcgtgatgggcggcccgcagaagatgctgatgccttcacagtttcccaaccagggccagcagggattctctggaggccagggaccctaccaagccatgtcccaggacatgggcaatacccaagacatgttcagccctgatcagagctcaatgcccatgagcaacgtgggcaccacccggctcagccacatgcctctgccccctgcgtccaatcctcctgggaccgtgcattcagccccaaaccgggggctaggcaggcggccttcggacctcaccatcagtattaatcagatgggctcaccgggcatggggcacttgaagtcgcccacccttagccaggtgcactcacccctggtcacctcgccctctgccaacctcaagtcaccccagactccctcacagatggtgcccttgccttctgccaacccgccaggacctctcaagtcgccccaggtcctcggctcctccctcagtgtccgttcacccactggctcgcccagcaggctcaagtctccttccatggcggtgccttctccaggctgggttgcctcacctaagacggccatgcccagcccgggggtctcccagaacaagcagccgcctctcaacatgaactcttccaccaccctgagcaacatggaacagggtaccctcccgcctagcggcccccggagcagctcctcagcacctcccgccaaccctcccagcggcctcatgaaccccagcctaccattcacttcctccccagaccccacaccttcccagaaccccctgtcactgatgatgacccagatgtccaagtacgccatgcccagctccaccccgctctaccacaatgccatcaagaccatcgccacctcagacgacgagctgctgcccgaccggcccctgctgccccccccaccaccaccgcagggctccgggccagggatcagcaacagccagcccagccagatgcacctgaactcagccgctgcccagagccctatgggcatgaacctgccaggccagcagcccctgtcccatgagcccccgcccgccatgctgccctcccccacccctctgggctccaacattccactgcatcccaacgcacaggggacaggggggccccctcaaaactccatgatgatggccccagggggccccgactccctgaatgccccctgtggcccagtgcccagctcctcccagatgatgcccttcccccctcggctgcagcagccccatggtgccatggcccccactgggggtgggggcggggggcctggcctgcagcagcactacccgtcaggcatggccctgcctcccgaggacctgcccaaccagccgccaggccccatgcctccccagcagcacctgatgggcaaagccatggctgggcgcatgggcgacgcatacccaccgggtgtgctccctggggtggcatcagtgctgaacgaccccgagctgagcgaggtgatccggcccaccccaacggggatccccgagttcgacttgtcgaggatcatcccctctgagaagccaagcagcaccctccagtacttccccaagagcgagaaccagccccccaaggctcagccccctaatctgcatctcatgaacctgcagaacatgatggcggagcagactccctctcggcctcccaacctcccaggccagcagggcgtccagcgggggctcaacatgtccatgtgccaccctggacagatgtccttgctgggcaggacaggcgtgcccccacagcaggggatggtgccccatggcctgcaccagggggtcatgtcccctccacaaggcctcatgacccagcagaatttcatgctgatgaagcagcggggcgtggggggcgaggtctacagccagccgccccacatgctctccccgcagggctccctcatgggccccccgccccagcagaacctcatggtgtcccacccccttcggcagcgcagtgtgtccctggacagccagatgggctacctcccggcaccaggcggcatggccaacctgcccttctagaagtcgctgccagggctggagccggggcaatgttgcaaatacgataaccttaacaaagttcttcccctcaatgttgggatggcctgggtcgcggggtggggtggagggggtgggagggggcttgtgtagggagtggcatttgtggaaaccagatgtgctggcagcttagggggaagtggcagtgtggggtgggggattttgcattggggttggttccatttcggccaccaggactgcccctcccccactcctcccaattcctatggagcctctctattttacctctttccgtgcatccctgcacccgccacacccccttcagctatgcttttggagtcctggatgggaatctggggggagagaggaaggacaggtcaggtctcccccagccccttctgctcctgtctcctcgtgtccgcattgctggagctccacctccctcttggtttctccgcacccgcccattttccttctgtctttacctgcttcgtatcctttccctgctgatgtggctgacccctctcccacccctccctgcaggcggctggccaggtgggcaggtgccagccggagctgtaaatagagcgctgcgcttttgtgctggtttgtgcgtgtgctgtatttctgtgttttgatagaagtcacacaaaaaaaaaaggataaaagaaacccttccccccttcttcaagttattgctccctccattcccctggacccagggacatgcagccctacatggccacccactgtttgcagtgtctctgggtccctaagggataccattcctgtctcgtccccaaatggtaagatgacgtaaatgacccactcctaaactgaggtcagaccacctaggcttccacctggtgagccctagcagggctgagacccccagggcggcagcctgtctgctgctgagtgattcagggagaacatgtgtgcacgtgcatgtgtgtttgcccacaccggtgacacggggccctggctttccactttggatgcccgggcatccgctgctgctacatcttagccagaacttgaagtcttttgtcccagtttgggatgaaggaaaggaggaagaggcggtggctgtgtggcccccttgagtggagccatggaaggggtggcatggtgccactggggcctgtggctgtagtagccctgggccaggtaacctccagggccctgacttttccagaggctgctgccacctacttcttatcaaagaagggggagaacagttcatctgagtcagtgcacctcccctccagtctccactccctgaggatggaatcggggaaacagcatcctgccgcctcctctctgcctgcccactcaccggcaaggttgtccctctgcccagggctcagggccatgtaccagatctgtctgtgcccacccaggcacagccactgcctcccccttggctccctgctcctacccaggagagctccctatccgcctttggtcagagctgaagccatatacgactgggtgtttgtccccctactttggccccaggagtaaaaaaacttctccttttctcacttcctttcctgcctcgggaggtggcagggcagttccctggctgaggccttttgcgccccacctccaggaccaagggccattctagacagggtgtcttctaccaggacccgtccctagccttcctggcctggagggcctggtcttgcactggcagctgtaatacaaagggaactcgccccacttctcccagcctggtgctgtcctctcggcccaccatcggccaggtccagcgcttcctctggggctgacaacaggcccctgactcaccccggtcacctcccagggtccatggccagggcctctgtgtttggggggccacttgcccttcatcctgccaggcgctttgcccgccctgcctcagcctgggccctgtgcccttgagccctccacccctggcccaagacccccccaaactgtctgactctgtgtttcctgccctgaggagagaggggtcagattgcagcgggccgagtgccctctccgtcccctctcctcccacccacgccacaggccagcctactcttccctccatccatggccacacccccagccattttgtaccattatataaatatatatataaatataaatatataaatacaatatgtgaagacatcttcttggtttttattttgaaacaatttttaggcttgttccgggggtctctgtgctgcctgtactgtattgacctgttttataggtgcctttttattaaaaagaaaattcaaaa

SEQ ID NO: 6816 - DNA, 1061 bp, Homo Sapiens
  NM_182563
gcctcccagaccctgagctccagtctgcacaggccaggtgtctggagccgggcctggtgacaggcatcccccaggtgggaggaggggctgtcctggctctgacctggatatcagatccagagctgagggggaggcgcagggtcaggaggggaggggttctgttctgagtttcccctggccaaggctgcagacaagggacgcagacaatcggcacattgtgagcaggggctgcaggatggaaccagcaagctgctgtgctgagcgccccaaacctgggcctacaggggtgaagaccaagccctcctgcgggggctggagagccgtgagcctgctcctgctgctgctgctgctggtgctggccgctgtgggggttgtggctggagggcttcttggctctgctcagggccctcccaagccaaggctgcagacgctgcgaatgaccctcccgagcccccacatgccccggcccaaccaaaccatcctggtggacgtggcccggaacgcggcgaccatcacagtgaccccacctcagagcaaccacagctgggcggtgctgttcgacgggcagagcggctgcatctgttaccgccctgaggagcaccaggtctgcttcctccgcctgatggaggacagtgatcgggagaccctgcggctgctggtggatacctccaaggtccaagaggcttgggtccccagccaggacacccaccacacccaggagctgctggcagtgcaggggagcctcgaagtggaccccgcccaggcgggggctttggtgcagcgcctgtgcatgaggacccccatctactgggcccggcgagcagaggggccccggagacagcggctgatttatctctgcatcgacatctgcttcccgagcaacatctgcgtgtcggtctgcttttattacctcccagactgagcccccgacctggcccagcctggcccgtccccaatccagtgggctggccaggccacctgcaccagggaggacagctgctggcagggactaataaacccttccacctggcaaaaaaaaaaaaaaaaaaaaaaaaaaaaaa

SEQ ID NO: 6817 - DNA, 1604 bp, Homo Sapiens
  NM_182565
attcgaatcgaacgtccttacgggagccgggcgctggcggagcggcgccccggccaatcagcggcagtccccgaacgttgggccggcccagccccgccccgcgctgttgtttgtggtgtcggccgggccgcgggagtcgaaccacaacattcgccgggcgggcggcggcggagcgggcggcggagcggcggcagcagcggtgagcgcgagccccggagccccgggcggccggcctcccgcgcccgcgcagccccgcgtctgcgtccggccggagacgccgggccccgcgccgcgccgcgccatgtcggtgaacatggacgagctgcggcaccaggtcatgatcaaccagttcgtgctggccgcgggctgcgcggccgaccaggcgaagcagttgctgcaggcggcccactggcagttcgagaccgcgctgagcacgttcttccaagaaaccaacattcccaacagccaccaccaccaccagatgatgtgcactcccagcaacacccctgccacgccgcccaacttccccgatgcgctggccatgttctccaagctccgcgcctccgagggcctgcagagcagcaacagccccatgacagccgcagcctgctccccacctgcaaacttcagccccttctgggcctcgtccccgcccagccaccaggcgccctggatcccgccctcctcccccaccaccttccaccacctccaccgcccacagcccacgtggcccccaggagcacagcaggggggcgcccagcagaaagccatggcggccatggacggccagagatgagactggacgccgccgggcgctgggctggagctgggggcagcccagggttgtggggacacaggagggccagggaggggggagccggggagggcagggggtttcccgaagatcgcactggaagattttataaaagaatttttgtgggtcggggggacagtaaacttcctgggccacgtgggtccttcaggagtttttcaggcaagtttttcctctgtttttaatatataactataatatatatgaatagataaatataactaatgtgcgtgagaatgggcctggcacacctggggtgctcgggggtagggctgccatgctgcagagctgatggagtgatgttgtgggcacaaggcatctgtcagctgcctcctttaacagccatgccttctggaatctggaagaggacaccactcctgcagtcactgggcagccacatagcagctgcaggtcccaggagggcctgaggtcaaagctgtggaaggccctcttggtatcagggctctctccccatggcctcttccccacctctgattgctggttgtggccccatagctcatcacccctgtctcctgctgaatgtgcagggctgatgtggcactgaggagctgactttggtcaaaggccaggctctgcccagcaggggacttgactgccctgggcgccctgcccctcccgctgcgtgtccaggtccaaagtggagagcctgcctttgggtttagttcccgaatcagaatcccatctcaccagggcgaaattttaatttaaaaacttaaaaagagacttttctaacttcaaaaaaaaaaaaaaa

SEQ ID NO: 6818 - DNA, 5207 bp, Homo Sapiens
  NM_182585
gaccgcggcgacttggcggcgggtgccatgcgtctggagcttcacattctctgccccccacccaccgcgccggcgctcccttgtcacgcctcgggaagcgcgcacctgccaagcaggatgaataatctgatatcatgtgaaatgaggaaataagaagctttctgctgacttcattttgacccagggtccaaaaggtgatgtaatcctgtggcaagaagattcaaaactgtggactatcttgcaaaaaatacaagaagatattgaaagttttcatgagtgcctaccacctaatctcaaacactatcattcatatgtgcctcattgagcaaatctttaatgaggatctatatgccagataatgtaggcattgttcctaagtcatgcagaggggttgtgtaagcatggtcatttgcatcattatcctgcacgtctgatacagccaaactccacgccacctggtttgctcaacagcaaaagacacggccgggtgcggtggctcacccctttgatcccagcactttggaaggccgaggcgggcggatcatttgagcaatatcttttgcttgggagcagaaacagaaagtacatgatggacttcattgaaggatggagatttggaagacatgaatggatgaagaaccaagtgcgtgagggcacctatcaggattattgctgaaatccttatggagttaactggctgagaggaagtagagatggggtttcaccatgttgcccaggctggtctcaaactcctgagctcaggccatctgcccgcctcggcctcccaaagtgctaggattacagaaggtgcctgcttccccttcaccttccaccatgattgtaagtttcctgaggcctccccagacatgtggaactaacaggtttctcttattgcctggatccaagagcatctcctgggttcttcctgttagaatactgaatgtccatggagagtttaacataaggaagaagagggctgtctcccagctgaaactggtgcagcagatcatgcaaagtaaaacctcagcagctgtgatgaagtagagcagagggcctgggtgtctgtcagctccaagcggaagatttccccagctttctaggtaactgtgcttccactgagcaagccagacacagacttgaatgtcatcacaatctgtgcctgtgacatctttccccaagaacagcacaaattgaacttttacattcttcataatatggaaggaaaggtattgactgagccacttctttatgcctcaagacatctcatatgtatttatatggatacatacatgaatgtatatattctgtcataataacatattctatttttcttattatagcacagtgttaggataggctacataggctgcattaaaccctcaaatagaagtttatattatgcatcagaagccagtgcagggactctcctcagcacaacatctctaagtggtgacttggaggttcaggctcctttcatcttaaaatgccatcatcttcagcatttggcctcaacagttgccagagagggagaagagagtatgtataagaccacactgcaggatctgtggtaggtctgcaagcactgctgtcacctctgccaaatcccgttagccagaacccaatcatatggccccatcctaactgcaagggaagcctgggaaaggtcttcttgtatgccaggaaaagaaaatgaaatcgacaagtatctagccagtctttgctacaagtttctacatgttggaattattatctatatttttcttctgatcatgcttagcatttgatactatgtagactgccttgttgagtcctactgtattttgtgacatccacatgcagcatcccattcctcacaacaggactaggagtggtcagaagttttatcacccactttatggacggaaaccctgagacccagagcagttacatggcttgtccaaagttacatagtactgttaacttaaaaacacaatttataaatttagacaaagaaagaggagactttatttcttataaagggttatagccttcaaggtggctatctcacaggctgggaagctcagccttcagcagaagcccagagacaagcattttgaaggcagaggggttgggatggagctttatgctgaacaggttgactaaatatacatattcaacaggttacaggaggagctatgaatattcatgagggtggtcctgacacatgcgtattgaacaaacatacatgtaacacatgacccatgttcactttgggatggagacttaacatttcagtgtattacagttaggccctacacatcaaaaggtcatttcaggacacaaaagctcacaagtacacaatctctgtaaactagtcagaaccagtccatggttggaaaaagttactaaaattagtctctcatccaatgaaagctgtagttatggctggtggaacaggggttcagttgggcagagtctatgagcaggatgatttgcaattgtttaaatattgcttatcttgaggccagtgcttgtttagctgctggagaaaaagaaaatccttgtggcagttagagcatagtttcttccttaggtgtaggagtacatgacttcccctcacctggcatggccttaggtcctgtttataattcggtatcttattgccacaaagaatctgttctgtgagtcatgtgatctctattggaacattaatgctgctcagttgttgtgtctaaaccataaaagagaaggggagtataattaggcatgtctgacctctcatcatagctgggaactaagtctttaaatttttttctggggtcctcttggccacaagggggtccatttagtcagtgggggccttgggatttatttttagtttacattgctaagtgacagagctttgcttctttcactctgaggttagtggtctctctgctgtgccacattgtcttccccagaagctcaaactggatgcccagccctcagtgtacaaactcaagtatgcaagaaatacatctttattcttttatgaatatacctaatttatatgttggaaggtgtcagcaatgaatttgatcactttggtatttctctacctttaaagatatgtttacatttggggtgggatgaaggtttggtggaggggaaggtggtcaggttgggccaaggtattgggaaatccatttgttcctcatgtcagctgtttgaggaggcaccaacccagatgtccacagttccttctggccttcctttaccgatactgatgcacctgtgcctccttcctgtgtgcatggcccatttgtgcccagcatctccctgctattttggggccactccagggtctgggaagttctgtaggcttataacatacagtcattcttctccccagcttgctgcctccctgagacacagaggtagagaagtaggaaaggacctaccgtacccaggcctttgccctctcacttttcatccatccttcttcccaccagtggagggatgtgtttctagtcttccagggaagctcctctctcctcaaaccattttcttccaaatactttggctttattccaaatcctctctagccctctgagatttttttataacacaaaacacaacttacagaagttgtgttgttgttttgctgtttatcttgtcacattatttctctaccttgaggcaacaggacaagggcctgctgtccagcgcacggaggcagggaggaaggggtaggggaatactaagaaaaaaaaatttctcgatcacatgtgtaccacatttaactttatcaggtccttgtgaggtgagtatctgtgtgtcattgttctgaaactaacagtgaggggacaaagcattgataggagttcttacaatatatttgggaactcgcaggtgagggcctctcctgcctgattggtctttcaatgtaccatcccaacccacccacctcaatccccatggcttggtcctgctgtctcggtgatcaagctttcagttaagaattgggtgataatgagctagttaatccaatttaaaaaaaaagaattaggatctgggctcagaagccccacagctgtgaaagcttggccgtagattactagtcttctagatgtagaaaagatttttcctttctctggctatttaagtctttatcagtcaccctgcctcagttatcaacacacaccctagagtaaatctgttccctgggggtggaaatagaaggggcatgtcattgtacatccacactgatgaaaggaaaggaaacattaagatggcttaagtggaaaggtcacatacggcttgtactagagagacaccatgctaaagcaaaacatcgtttaaaaaaattctgacttatcatgtgctcagaaatgctcaaatgggtacaaccatcaccaagggtgggatgggagggcagggggaaaaaatatgaagcatcaaaaaaaattctgatttgtatttgtgaaattcaatagtaaccctattcattaactggattttaaaatcatttcaaagcacattcggctttcaaaagatgtttgtttaaataacacagttggcttttggtcaaaaaatgaagtttcggtaatgcatagtaacaactgtagtgtaattactggccacaaaataccaggtgccagaccaacccttttcgaaccatttaagagaaccaagccaagcaaaaatgcccagcctagccttacccagaagttcaaaagctcagcctttgtctccaggaaaaaattaattcaaagagcaaagccattattcggcacaaccaggtattctgttgtaaacatcttttgttaatacatgttgaaagctgaactttctcacgtttgagtgaaagagggctgcttaaagagagtttaaaccaagccaggttcaaggtttttttcttttctttctttttagatttctgacttcatatctgtgggatccacacaatggggaggtactggccttggaatccatggttccccagctatcattttactttagaattacagtgttctctgttagtgtcaagggaatgaacctgacgagaaaagaccaaacataggactgttacagggaagaaaaatatgaaaagacctaaagatgcacgtcctcattatatgtaaggaatctatttcctagaatcctataaaaagctcaactgaatttgcttcagttaataaatgtgatttaattataatcataatgccacagaaaaaaaaaaaaaaaaa

SEQ ID NO: 6819 - DNA, 1686 bp, Homo Sapiens
  NM_182597
agttaccaactaaatcagggcatggtgtttttttgttgttttctttttaaagcatagttttagtaatatatttactaaaaaccttagacattatgaaaaaagtcaggatttggaatcttacactgcttggctaaattgacacaatatagaccaacagtttcatcctggggcttatgggtctcataggagcacccgtatgctgaagaaaggcaaagagagaactacagaatttgtagaaaagttttgttgtagttgcttctgaacaattagtttttgtttgtttgttttgttttgttttgtttttctggtaacctagcagtcaaagctcacatttttggacaatgactcattcttcccaggacactggttcttgtggcattcaggaagatggaaagctttatgtggtggattccataaatgacttaaacaaactaaacctctgtccagccggatcgcagcatctgttccctctagaggacaaaatcccagtccttggcacaaactcaggaaatggaagccggagtctgttttttgtggggctgctaattgtgctgattgtcagcctggcactggtttttttcgtgatatttctaatagttcaaactggaaacaagatggatgatgtgtcaagaagactaacagctgaaggaaaagacatagatgatcttaagagaatcaataacatgatcgtaaagcgactcaaccaactcaaccaactggactctgaacaaaactaaaggaatgattttctgaaagcacctgctaacaccttgagctttttactttcctgggagtgtacagggttaggaactgagaaagtgcacttcctcaggcaacagatgatctggtcaggcaacccacccctggggcccactttctgcagcaagatgggagcaattccaaggcaagtgggtatgggaatagcaactaaaaaggggtgaacttgtctcagcccccttttatggtagggcacttcaactttaatggggtgggcggctagcagggaggagaatcaacaaagcaagagaacttgactatgtacgtccaacttcttacagaaggagctttgctaccagaacaagttcactgtgtcaatgaagttcatgacacctcatgcacctttacagatatctgggaaagcctgagaaattcattgagttttatgtattgaagggaaccaggtgattactcttttcaataagagggattctgctcaggtgattagactttgactctatttccccagggacagtgatgggtgggccccagagctagttgctgtctggtgtttgctggtgaaaacatgagcagtagttatgtggggctgagagtcaaaagggaaagcctaattaattcaactaatgtttattaagctcctactctgtgcaaatcactctactcaagaggagctcacataagagtgcaggataaagaaaggagatggacagttatatgtaattatataaactttgtgtattttgtttctcatgaaaaaacccctttggcaccctgctgattgatttggaagaaatctgatagatttgtggcctttcctaaattgcactaggaaattatgtagttagaatatttggaacctgcattagttccagcaatgaaagtaagacacacagcatatgacataagacacagtgtgaaataaatgagtttaaaaagcaaaaaaaaaaa

SEQ ID NO: 6820 - DNA, 2140 bp, Homo Sapiens
  NM_182605
aatagacacaaggagaggcaagaagctccacctcaccccagtgggggctgcaggtggatggagaccagggcatgcggagcgcccctgagcagccgtggctggggtgggagcagggccatgatggctctggagaaaagtggggcaggcagctgcctccctggggctgaggggctgcaaggagaagttgcatccctatgcatggcctatgcatggtacccagtccccatggccaccctggcatttcaggcatctgctgtgcgccaggtcaggccccagaccggcatcctctctctctctgtgcacccgcacctggcaggaagcggcagcaccatctggttgcctggcaaccttgtcctgctcccagctgcctgtggccccactggactcagccccccagcagggaggccttcggctgcagggcaggggctgggcgggcgcaccctgtggctgggggcactcaggagccctggcttcacctctgctctcggcgcacatgtggacagctcaccctccagcaggggcccggaccaaagtccttgacccaccgggttctgagtcctgacagggctgtggacagcttccctttccaccccggcacctgctggcaggagcttccgggccctcaccctggggcagcaactcctgcaccaccagccacgcccggccacgagaaagtgcagaacagctcaggcccttctcacaacttcctggagctcagacacagttttttgagcacaaatggtgttaggtgacagactcgggattggccttggacactcagccccctctttctggagcaaagactcatgacccacgtccaagtcaccctgcacatccctaagcctgaccgtgaggcagccctcacggatgcccaggactccctgtccgcaccaccaggcagccgaggcaggtttggaccagcttctcacactcacaccttcctagggttgccccaggccctgacctgctgaccctgcagctatgacctctgacctgtggaggatgggaggggcgagcagcagggagagtgggaaggaggaatggaaaaccgtccaggaagggaggctgcagccccgacacgaacaggagccaccaccagggggtgctgtgcagggctcccggaggacaggaccttccagggcctccctgccccgaacccataggtgccaggcttctcactgctcacgacctccgtgccgggctcatacctgccgcgccagcccctcttcagcagagcacaagtctggcagcaggagggcaccagccaggggccccgcgcccccgcctctgtacagcagggtcaccgtggggtgacatgagaacaccgacccagggaatgggctcctgccacacctgcctgggaacctgggctgtgagtcctgcccgctgcaccctctagcctgacgttgaagtaacctcgccagcggggccctctgtggcactgggcactcagggagagcacgtggcattggagaaggtcccacccccaaatgcaaagctgggaaaaccaggctgagccggggatcaggccacctccgcagggacccactgctgcctcttccaggagcccaggagacccagtgggtctcctgcccccgactccaactccctcctggcaggacacacccagctcacagtggcctttccatcctgggaaagggagtgagaggaggctcaggccagggacccgcccagctctggccggcaaccgcccttcagcctttgttcctgaaccactgtgtgggccccaacccatccgctgcctgccggagggagcccatggggaatggactattcttgccacccctatccatggcaggggaggggctcagcatggctcttgcccacccagaagaaggtgcagggggcctggcgtggtggttcacacctttgggaggccgaggtgggtggatcacctcaggtcaggagtttgagaccagcctggccaacatggtgaaaccctgtttctactgaaaatacaaaaattagccaggcgtggtgatgggcacctgtaatctcagctactcaggaggctgaggcaggagaatcactttcacttaaacccaggaggcggaggttgcagtgagttgagatcgcgccactgcactccagcctgggcaacagaacaagactccgtctc

SEQ ID NO: 6821 - DNA, 3145 bp, Homo Sapiens
  NM_182607
aaagtctatacgcaataagtaagcccaaagaggcatgtttgcttggcgatgcccagcagataagccaggcaaacctcggtgtgatcgaagaagccaatttgagactcagcctagtccaggcaagctactggcacctgctgctctcaactaacctccacacaatggtgttcgcattttggaaggtctttctgatcctaagctgccttgcaggtcaggttagtgtggtgcaagtgaccatcccagacggtttcgtgaacgtgactgttggatctaatgtcactctcatctgcatctacaccaccactgtggcctcccgagaacagctttccatccagtggtctttcttccataagaaggagatggagccaatttctatttacttttctcaaggtggacaagctgtagccatcgggcaatttaaagatcgaattacagggtccaacgatccaggtaatgcatctatcactatctcgcatatgcagccagcagacagtggaatttacatctgcgatgttaacaaccccccagactttctcggccaaaaccaaggcatcctcaacgtcagtgtgttagtgaaaccttctaagcccctttgtagcgttcaaggaagaccagaaactggccacactatttccctttcctgtctctctgcgcttggaacaccttcccctgtgtactactggcataaacttgagggaagagacatcgtgccagtgaaagaaaacttcaacccaaccaccgggattttggtcattggaaatctgacaaattttgaacaaggttattaccagtgtactgccatcaacagacttggcaatagttcctgcgaaatcgatctcacttcttcacatccagaagttggaatcattgttggggccttgattggtagcctggtaggtgccgccatcatcatctctgttgtgtgcttcgcaaggaataaggcaaaagcaaaggcaaaagaaagaaattctaagaccatcgcggaacttgagccaatgacaaagataaacccaaggggagaaagcgaagcaatgccaagagaagacgctacccaactagaagtaactctaccatcttccattcatgagactggccctgataccatccaagaaccagactatgagccaaagcctactcaggagcctgccccagagcctgccccaggatcagagcctatggcagtgcctgaccttgacatcgagctggagctggagccagaaacgcagtcggaattggagccagagccagagccagagccagagtcagagcctggggttgtagttgagcccttaagtgaagatgaaaagggagtggttaaggcataggctggtggcctaagtacagcattaatcattaaggaacccattactgccatttggaattcaaataacctaaccaacctccacctcctccttccattttgaccaaccttcttctaacaaggtgctcattcctactatgaatccagaataaacacgccaagataacagctaaatcagcaagggttcctgtattaccaatatagaatactaacaattttactaacacgtaagcataacaaatgacagggcaagtgatttctaacttagttgagttttgcaacagtacctgtgttgttatttcagaaaatattatttctctctttttaactactctttttttttattttagacagagtcttgctccgtcgcgcaggctgtgatcgtagtggtgcgatctcggctcactgcaacctccgctccctgggttcaagcgattctcctgcctgagcctcctgagtagctgggactacaggcacgtgccaccacgcccggctaattttttgtatttttagtagagatggggtttcacgttgttagccaggatggtctccatctcctgacctcatgatccgcccaccttggcctcccaaaatgctgggattacaggcatgagccactgcgcccggcctctttttagctactcttatgttccacatgcacatatgacaaggtggcattaattagattcaatattatttctaggaatagttcctcattcatttttatattgaccactaagaaaataattcatcagcattatctcatagattggaaaattttctccaaatacaatagaggagaatatgtaaagggtatacattaattggtacgtagcatttaaaatcaggtcttataattaatgcttcattcctcatattagatttcccaagaaatcaccctggtatccaatatctgagcatggcaaatttaaaaaataacacaatttcttgcctgtaaccctagcactttgggaggccgaggcaggtggatcacctgaggtcaggagttcgagaccagcctggccaacatggcgaaaccccttctctactaaaaatacaaaaattagctgggcgtggtagtgcatgcctgtaatcccagctacttgggaggctgaggcaggagaatcgcttgaacccaggaggtggaggttgcagtgagccgagattgtgccactgcactccaacctgggtgacagagtgagattccatctgaaaaacaaaaacaaaaacagaaaacaaacaaacaaaaaacaaaaaatccccacaactttgtcaaataatgtacaggcaaacactttcaaatataatttccttcagtgaatacaaaatgttgatatcataggtgatgtacaatttagttttgaatgagttattatgttatcactgtgtctgatgttatctactttgaaaggcagtccagaaaagtgttctaagtgaactcttaagatctattttagataatttcaactaattaaataacctgttttactgcctgtacattccacattaataaagcgataccaatcttatatgaatgctaatattactaaaatgcactgatatcacttcttcttcccctgttgaaaagctttctcatgatcatatttcacccacatctcaccttgaagaaacttacaggtagacttaccttttcacttgtggaattaatcatatttaaatcttactttaaggctcaataaataatactcataatgtctcattttagtgactcctaaggctagtccttttataaacaactttttctgacatagcatttatgtataataaaccagacatttaaagtgtaaaaaaaaaaaaaaaaaa

SEQ ID NO: 6822 - DNA, 1953 bp, Homo Sapiens
  NM_182608
agtcgtctttgtgagcccgccccggcggggaggagctgcccggctcaggccccgcccacccggaggatcttggggctggtctgagtccgctcctgagacgtgaccacccgccccgcatggggccccagtcccagctgcttgatccggctcagccccgaggtgtttgcagcagctctttatgaaagtccagccatctgttacctgcgttgcttcctggggagggatagtccacctggaggcattcggagacccagtgattgtgctccgcggagcctgggctgtgccccgcgttgactgcctcatagataccctacgaaccccaaatgccagctgcatgagaaaagggactcaccttctggttccctgcctggaagaggaagagctggcattgcacaggagacggctggacatgtctgaggcactgccctgcccgggcaaggagacccccaccccaggctgcaggctgggggccctgtattgggcctgtgtccacaatgatcccacccagctccaagccatactggatggtggggtctccccagaggaggccacccaggtggacagcaatgggaggacaggcctcatggtcgcatgctaccacggcttccagagtgttgtggccctgctcagccactgtcctttccttgatgtgaaccagcaggacaaaggaggggacacggccctcatgttggctgcccaagcaggccacgtgcctctagtgagtctcctgctcaactactatgtgggcctggacctggaacgccgggaccagcgggggctcacggcgttaatgaaggctgccatgcggaaccgctgtgctgacctgacagcagtggaccctgttcggggcaagacggccctggaatgggcagtgctgaccgacagcttcgacaccgtgtggaggattcggcagctgctgaggcggccccaagtggagcagcttagccagcactacaagcccgagtggccggccttgtccgggctcgtggcccaggcccaggcccaggcccaggttgccccttcactcctagaacggctgcaggctaccttgagcctcccctttgccccgtctcctcaggaggggggtgttctggaccaccttgtgactgccacaaccagcctggccagtcccttcgtcaccactgcctgccacactctgtgccctgaccatccaccttcgctgggcacccgaagcaagtccgtgccagagctgttaggtactgccccgccccctcccctggttccccagtccccgccagggagtccccagaggtccccgtgggtcttcgtcccctaccagagccctcagggcatattgagcaagtgccttcagtggctacaacccagggatagcaccagccccaggccccaagtccccaagatcctcctctccaaggcatcctcatcctcccaccagtgccagccgaagcccagtccttcaggacaccaaagtctggcccttcctctctggcgataccaggagctcaggatagagaagaggaaacaggaggaggaggccagaatggcacagaagtaggggaagatgggataggacaggctgggaacaggtaatcaggcccctcccagggcttctttcccctctggagtgcctccggcctccccatccacctctgcctaagtaaatctgctctcaacctatatatatacaaggtcattcattctagcattgtttgcaagagtgaaagagtggaaacacccgaagtgtccatcagtaagggacaggctagattgattacggatgtaattgctgtccatccatacagagcatactctacagtgtattctaaaataagactaaggaagctgtttatattctgatatgaaactaccatcaagatgtataaagtaaaaataactaaggagtggaacagtgtatatggcatattattatttgtcgaagtaaaattttcacgaagataaacatgactaaga

SEQ ID NO: 6823 - DNA, 4378 bp, Homo Sapiens
  NM_182612
gcagacccagcgccgagcccgagccatggcgtccgagcggctccctaacaggcccgcctgtctgctcgtggccagcggcgccgccgaaggtgtgtcggcccagtccttcctccactgtttcacgatggccagcaccgccttcaacctgcaggtggccacccctggggggaaagccatggaatttgtggatgtgactgagagcaatgcacgctgggtgcaagacttccgcctcaaggcttacgccagccccgccaagctcgagtccatcgatggtgcccggtaccatgccctcctgatccccagctgtcctggggccctgaccgacctggccagcagtggctccctggcccgtatcctgcagcacttccactctgagagcaaacccatctgcgccgtcggccacggtgtcgccgccctgtgctgtgccaccaacgaggacagatcctgggtgttcgacagctacagcctgacagggccctctgtgtgtgagctcgtcagggcccccggcttcgcccgcctgccgctcgtggtggaggacttcgtgaaggattcgggcgcctgcttcagtgcaagcgagcctgacgctgtccacgtcgtgctggaccgccacctggtcacaggccagaatgccagctccactgtcccggccgtgcagaacctgctcttcctctgtggcagccggaaatgaacctgctgggtagatgcaccccctgagacagcccaggtgtctccagaggcagccccgtctcaggcttcagggaccccgcctcttccctcctgacaagggccctggatggcagcctggtctggccctgatgggattgttggaggcctcctggaatcagctctgagggggtgtcggctctcctggagggtccaaacccccatcctcctgcatgttctctggtaggaggcagagaaaagaccccacgtgcctggagagctgtgctagctgctaggtggtcctcgggaattccaggctgggttttctagggaggactggttgtcacgtgtggtcactgttgactagacagagtcggctcgggggtcctctgtgtgggtttgccctgctgtggcctgtctgccacccaccacctctttcactgttggtgggggccttgaggggagggcccagccggcgggagctggctcagaactttggccaaaggtgaacggaattttttaggagcagcagcctcctgccccaaggccgaccggcactggcagcactttcctgttgaagaaatcttcctggcgtgtggtttcaaagtgtaagcacctcagtgatgcaccctgtcctaagcattgagaggcacgtttacttgtgaatatgagaccatgagattctcaatgataggaaagtgctgtcccccacggccttgcacagtggcctcgggtagagcggctatcaagagcagacagtggtccagcctgctgggcacctggcctgggctgtggccctccagcgggctgccccctggccccaggttagggcgtccaggagaggcttaggccctctacttcctcacagttccccagtttgagccatcgaaggccttcttcctgcccacctccccgtctcagccacagccgttcccaagcaccagcgtggctcctggtgccagtgacctgccaggaggccccttgtgattataaaaccgttcagttgggccgggcgcagtggctcacacctgtaaccccagcactttgggaggccgaggcgggcggatcacgaggtcaggagatcgagaccatcctggctaacatggtgaaaccccatctctactaaaaaacaaaaatacaaaaagttagcctggcatggtggtgggtgtgtgtagtcccagctacttgggaggctgaggcaggagaatggcgtgaacctgggaggcagagcttgcagtgagctgagatcgtgccactgcactccagcctgggcaatagagtgagactccatctcaaaaaaaaaacgttcagttggctgggcgcggtggctcacgcctgtaatcccagcactttgggaggccaaggtgggtggatcatctgaagtcaggagtttgggaaaagcctggccaacatggtgaaactaaaatacaaaaatgagccgggtgtggtgtcaggcgcctgtattcccagctacttgggaggctgagacgtgagaattgcttgaacctgggaggcggaagttgcagtgagccaagattgcgccattgcactccaacctgggcaatgagtgaaactccgtctcaaaaataaaaaataataaaataaagccgttcaataaggagaatttggaaaaaagtggaagaaggaagcgctgcagccacatccccgccctgaaggctgcgtccctccagtgcctcgcagattagtcaggatgcccacttagcactggccacggggccttgctctgtcccgggtccactctcatccccgtgtggtgatggacctctgtggacaaatgctttttattttatttattttttgagatggagtttgtctctcgtcacccaggctggagtgcagtggcacaatcttggctcactgcaacctctgtctcccgggttcaagcgattctcctgcctcagcctccggagtagctgggattacaggtgtgcgccaccacgcctggctaatttttgtatttttcgtagagaccgagtttcaccatgttggccaggctggtctcgaactcctgacctcaagtgatcctcccgcctcggcctcccaaagtgttaggattacaggcgtgagccactgcgcccggcgtaatttttgtttttagtagagatggggtttcatcatgttggccaggctggtcttgaactcctgacctcaggtgatccatcttcctcagcctcccaaagtgctgggattacaggcgtgagccgccacgtccggctaacaagtacttttttatttttattttattttttggatggagtctcactctgtcgcccaggctggaacacagtggcacgatctcggctcactgcagcctccgcctcccgggttcaagtgattctcctgcctcagcctcccaagtagctaggactacaggtgcacaccaccacacccagctaatttttgtatttttcctttttttttttttttgagatggagtcttgctctgttggcaggctggagtgcagtggcgcgatctcagctcactgcaacctctgcctctgcctcccagattcaagcagttctcctgcctcagcctcccgagtaactgggactacaggtgcatgccactacgcccagctagtttttgtattttcagtagagacggggtttcaccatgttggccaggatggtctcgatctcttgacctcatgatctgcccgcctcggcttcccaaagtgctgggactacaggcaagctcatgtcttaatgtcctagtccatttgggctcctataagaaaatactgtaaactggccgggcacggtggctcacgcctgtaatcccagcactttgggaggctgaggcaggtggatcacctgaggtcaggagttcgagaccagcctggccaagatggtgaaaccccgtctctactaaaaatacagaaattagccgggcgcggtggtgggcgcctgtaatcccatttacttgggaggctgaggcaggagaatcgcttgaacccaggaggcggaggttgcagtgagctgacatcgtgccactgcactctagtctgggtgacagagcaagactccatctcaaaaaaaaaaaaaaagaaaatattgtaaacctagtggcttataaacaacagaaatcagtttcagttttggaggctggaagcccaagatgaaagcaccagtagatgcaacctcttttgtgagggtgatggtcccatgatgaggctgtgcccctgccctgtgaccggatgacctcccaaatgccccacctaataccatccccttgcaggtgaggacttaagcaggtgggttttggggggacgtgctcaggccacagcagggtgcatgaagagccagtgagcctcattgagcccctctggtcagccagatctgacattgagcccagcattgaagatcaaagcaggtggggctttgggatgtgaagtgggttctgacgcggggccccacagacctgtctccgcgtgagctgcctgcaggcccctgcgtcattcctcagctgcgtgcgaggcctctggcttggagagcctccccgctgtgcacagttctctctttgccagggcagggcttggggcagcaccaggctggggcagaggaggaaagcaagaggacagacctccagaagagcagcggagggcgggtgaggatttccccatataccagtgtgtgttcatctacccatgaggaataaaaccatgcagcagcatgcaaaaaaaaaaaaaaaaaa

SEQ ID NO: 6824 - DNA, 1882 bp, Homo Sapiens
  NM_182615
aataagcaaggagtttctccagcgaaacttcctcacacctcttggtcttggtctcttcagacactttccttcctgttctctggagatcttgcagaaaagagcctgcagtgtttcccttgctcagccatgctcctggagcttatcccactgctggggatacattttgtcctgagaactgccagagcccagtcagtgacccagcctgacatccacatcactgtctctgaaggagcctcactggagttgagatgtaactattcctatggggcaacaccttatctcttctggatggaaagaactgttgaagaagcttttatacttcttgtttgcttgaagccttggagggtagcaagtagtctggagaaaaaggagaaggaggatgaatctttccagctgctacttggctcacgctataatgtattagaggcacactgtcttctacctttgataagatggctaacttcaggtgactcactgttatcagctcagccacattgcccacaggaactgtgatgggcactttatgcgaatcttaaaggaggttcctgcagcatgagaggcttctccagcgtccggctcctgcagtgcacccacaccaggttcctgcgctgtacagtggccagcagtgtcctccagcacttccatttttgcgtggtactgcagaacagagcctgcagtgagacaccttcctgtatccagctttccccatattcatccctagattcatgaaacggcaccctagattatggttttctggtaagtatgagagggtgaatttctctgtagaaaattcacagcacaacagtgacttctgtgtcatctagtgagacacagttgtgcctttcccaataagatctgggtctcacccctggggggtggggctaggggtcccttcttggggtgttgtacccagccctaggagtagggactgcaccttatatctgctattcctacaggaataggaatagcagagttttcttttctttgtattacctatttccttgttactctaaatcctgttataattaataattttttatattaatattaaattttcctataattataaaaagcattttctgttcaaattattatatggtctatctttcctgattggaccagatttatacatgcaccaaggatctcaagccactgaagagcatctccccacccagtcacctgacaaatctagttgcttgcttgttttatttattgctcatttgttttatttatttatggtttattattttacttatttattgttttacttatatgattacaagaaactttatgcaataaagaattacattaagaagaatttggaaatatgtttttatattaatgaaattaattttgatttttcacattttgtgcatgtttgacacaaaattttattataccattgaggcaaattataatcccttttaaatgtatttcagcttacaacacaaattgtctttcattcactaatgagactgtgtctgaagattttaaattccaagtcatttttcattcatctaactctcttaattatccttatttttgatttctttaaaatggagggaaaagaccatgataactttaaaacaatctgaagacagaatacttctaacacccagaaagtttttgtgtgtgcctttccagtcaacccaccttctggaggcaacagatgttcatatttctagtattacagagactttaactgttttaaaacttcgaatcaacgggattattcagtaggaactctcttctgcctggtttctttcactcgtcatgttctggaggttaatccgtgttcattaccgtaattgttgagaagtttcctattatatgaataaagcacaatttatttattcaaaaaaaaaaaaaaaaaaaaaaaaaa

SEQ ID NO: 6825 - DNA, 2128 bp, Homo Sapiens
  NM_182616
aaatcccgccgaggaacgcctgagggccgggccgcgccattcccggatccgccggctgggaatcgcgggtccccgcgcgtcctgcagcacttcccgcgccgcgcccccagcccagtgcgccggctctgtgccggggtgcccgggcggtcgggagaatgagccgcatctaccacgacggcgcgctccggaacaaggcggtgcagagcgtccggctgccaggggcctgggaccccgccgcccaccaggggggaaatggtgtcctgctggagggagaactgatcgatgtatctcggcacagcatcttggacactcatggcaggaaggagcgctactacgtgctgtatatccggcccagtcacatccatcgccgtaaattcgacgccaagggaaatgaaatcgagcccaacttcagcgccaccaggaaggtgaacacgggcttcctcatgtcgtcctacaaggtggaagccaagggggacactgacaggctcacgcccgaggcgctgaaggggctggtcaacaagccagagctgctcgcgctgacagagagcctcacccccgaccacacagtggcgttctggatgcccgagtcagagatggaggtgatggaactcgagctgggggccggggtacggctgaagactcggggcgatggtcccttcctggattcattggccaaacttgaggctggaacagtgaccaagtgtaatttcactggtgatggaaagacaggggcatcctggacagacaacatcatggcccaaaagtgttcgaagggggctgcagcggagatccgagagcagggggatggggcagaggacgaggagtgggatgactgagggacgtggctgcctctgggggcaccagcaccttctgtagcattgtggaacatttcttccatgaacttctactctggagctggagagaacagtctgccaagtcttacctggttcttccccatagccaccttggaatactctttgaacaagctctgctaaaaccaaacccatgaccactgtgttggtggtggggcctcatgctgtggctcagggagggcccctccctgcatgtgagtctagccttcctagacattacatgatgaccctttaaaaaaaaattagagatggaggtctcactatgttgcccaggctgatctcaaactcctggactcaagcgatccacccccctccacctcccaaggtgttgggattacaggcgtgagccactgcacccagcctcatgttgaccctggccctggatagcagctttgtttgtagaggcaggtggtgggagagaccctaggacagcctgagagtaactggacctggtattggtgcggagtggggaatatcccttgtctaaatgcagagcagctgagagaagttagcggggctcttcctccgttctcattgtttcctgctttccttccccacccaccccttcctcagcactctgtgttgtagcctgtactatcctgcttcaagcctccgtgtcccttgtaccttccccctaccttgagttgccagttctttactccctcaaatgttcccatgccacctctggggtttctgttatctgacatccctggctgctttcctggtagatgccattcccagagaggccaacagcgttcccaggcgtggctggctggtccgcatctctcagactcactctgccaggctacagttttgagaataccttttttgttgttgttttgtacctggagaactttttatgaatgagtaaatcttcagaaaggaattcctccacccttactgggttattgtcaggtgtaaacggcctttcagctgagcaatgttcctatgagaaggaagccatttctcttggctcatgaacactgccttttgggtagtatacccacacccagatctgtgaagagacctggaattgaagtctccatgtcgtcaggacttggtggcatgtggatcttgcttgacttgggaaaagagagggtggtggtgaactaataattatggagtccccctaatgtgtcgaacacaatgctagatgattaaaaaaaaaaaaaaaaaaaaaaaaaaaaaaaaaaaaaaaaaaaaaaaaaaaaaaaaaaaaaaaaaaaaaaaaaaaaaaaaaaaaaaaaaaaaaaaaa

SEQ ID NO: 6826 - DNA, 1993 bp, Homo Sapiens
  NM_182621
ctcaggctcagctccgtctcgctcggtccctcgcttccccgccgggctctagccggccgtctggtggcccgaggtggcggcgggctgggcgcggggcgcgatgagcggcgcctgcacgagctacgtgagcgcagagcaggaggtggtgcgcggcttcagctgcccgcggccggggggcgaggcggccgctgtcttctgctgcggcttccgcgaccacaagtactgctgcgacgacccgcacagcttcttcccctacgagcacagctacatgtggtggctcagagatggggtttcaccatgttgcccaggctggtcttgaattcctggactcaagtgatcggcccaccttgtcatcccaaagtgctgagattacagcattggcgctctcataggcctgtccgtagcagcagtggttcttctcgccttcattgttaccgcctgtgtgctctgctacctgttcatcagctctaagccccacacaaagttggacctgggcttgagcttacagacagcaggacctgtgcaggttgccacaaacaagaggaatcagacagttctcaccctcaaggggctcacatggaggacaaggcaggcacacaaatggccaggaggcccagtggtggcccttcatggggctttagggaggaagaaatgatgtctgagctgaatcatcaaagatgactcaaagtttccaggtggttcctaacttcctggcaacaaccacaattgtaattcgttcaaagagattgactgctgtggagacagatcatcaccatcaccatcaccatcaccatcaccaccaccaccatcatcatcattgtcatcgtcatcattatgttgcttttagctcactggagcctcacagaaccctgtgagggcatggacagatcttcctcagaggaggcctcagcaagtgtcagccacacgaatgagtgtatggagcaaaggaggagtgaacgtctaggagaccagccgttaccccaactcctccccatccgctcctactctggactccaatctatgccctaccccagctcttggatttggcctttggatcaggttcttctggtaatgaagcctcacctttcccccaactaactctgatctggcctaccctgctcctgactaacctcaaggatcctgagtctccttcagcctaacagctccagaagctgaactccagccctaagagccccagctgcagacaggcctctggccaagagcttagtcaggctaccctgactaagccacagggttggcatgccctctgggcagcccctgaaccgggctctgaaaacacaggaatggacaaggtaatctacccgagtcctgagcctgcaaggtagttgagacagatcttgaaggagagtgggcacagtcagaaaggaaaaagtggctcagtgtaaaataaaactgacacaagcccatgtaccagcagccaattggatctttttttttttttttttttttgagatggggcttctcttattgcccaggctggtcttgaacttctgagctcaagcgatcctcccaccttggcctaccaaagtgctgggattacaggcgtgaaccaccaattggatctttactggacccctacagggcactgagctagggaatgttggagattcagaggctgaatcagatagcagcccaaccctgagatacaactgagctacaggcaagaggatactaccgggcgcagtggctcacacctgtaatcccagcactttgggaggccgaggcgggtggatcatgtgaggccaggagttcgagaataccctggccaacatggtgaaaccccatctctgttaaaaatacaaaaattagctggggttggtggcacatgcctgtaaacctagctacttgagaggctgagacacgagaatcacttgaacctgggaggtggaggttgcagtgagctgtgatcacgccactgcaccccagcctgggtgacagagcgagactctgtctcaaaaaaaaaaaaaaaaaa

SEQ ID NO: 6827 - DNA, 1584 bp, Homo Sapiens
  NM_182627
cgaggaggggagcgggaagcgcagtgccagcgccacagcccttcaatcattttggttgctatccagcttctccacatcaagtccaacttcagaaaccccaagcctgtagagaaaagttgacctgtgctgactctggtgatggtgactgtctctcactaatttctttgaagtcttcaaggataagcagagttgatccatctgagaaagggatcatgaactagacagaatgaacagccttagaggcacagactcttgaacgggacggtggtggtatgactagtgcagagtgtttagagatcactcagtttttaaagactggcctttatcgtgtctcagtgcagccgaggcagagcctttgaaggatgcgatgttgtcattcttactaatctagtccagccgctgaggtgactttcaacggcagaccgtctcctgagcgccccaggtagaatttcaaaagtctccgggaccattatggcagtcaagtggacgggtgggcattcttctcctgtcctctgcctgaatgcaagtaaagaagggctgctggcttctggagcagagggcggagatctcacggcttggggtgaagatggaactccattaggacacacgcggttccaaggggctgatgatgttaccagtgtcttattttctccctcctgtcccaccaagctctatgcctcacatggagaaaccattagtgtactggatgtcaggtccctcaaagattccttggaccattttcatgtgaatgaagaagaaatcaattgtctttcattgaatcaaacggaaaacctgctggcttctgctgacgactctggggcaatcaaaatcctagacttggaaaacaagaaagttatcagatccttgaagagacattccaatatctgctcctcagtggcttttcggcctcagaggcctcagagcctggtgtcatgtggactggatatgcaggtgatgctgtggagtcttcaaaaagcccgaccactctggattacaaatttacaggaggatgaaacagaagaaatggaaggcccacagtcacctggtcagctcttaaaccctgccctagcccattctatctctgtggcttcgtgtggtaatatttttagttgtggtgcagaagatggtaaggttcgaatctttcgggtgatgggagttaagtgtgaacaggaactgggatttaagggccacacttcaggggtatcccaggtctgctttctcccagaatcctatttgctgcttactggagggaatgatgggaagatcacgttgtgggatgcaaacagtgaagttgagaaaaaacagaagagtcccacaaaacgtacccacaggaagaaacctaaaagaggaacttgcaccaagcagggtggaaatactaacgcttcagtaacagatgaggaagaacatggcaacattttaccaaagctaaatattgaacatggagaaaaagtgaactggctcttgggtacaaaaataaagggacaccaaaatatattagtagctgatcaaactagttgtatatctgtataccccttaaatgaattttaaatccaataaaaacatttgaagaaaaaaaaaaaaaaa

SEQ ID NO: 6828 - DNA, 1625 bp, Homo Sapiens
  NM_182639
ggtcctacccggaagcgcgcccgggctcctgcaggcggggcgctgtgcgcgccgcgatccggtacgtgggcctccgggctgtcccctctgggggcggcgatcctccctccggagccccccttcaaccctcccggaagtgagcatttgcaggaccagggatgctgtgctgctctcccatgagccagtcaccgagtcggtctgctgcagccctttctgaacctctggccgtctggatgctccactgtgcttgccaagatgaagtgcgtcttggtggccactgagggcgcagaggtcctcttctactggacagatcaggagtttgaagagagtctccggctgaagttcgggcagtcagagaatgaggaagaagagctccctgccctggaggaccagctcagcaccctcctagccccggtcatcatctcctccatgacgatgctggagaagctctcggacacctacacctgcttctccacggaaaatggcaacttcctgtatgtccttcacctgtttggagaatgcctgttcattgccatcaatggtgaccacaccgagagcgagggggacctgcggcggaagctgtatgtgctcaagtacctgtttgaagtgcactttgggctggtgactgtggacggtcatcttatccgaaaggagctgcggcccccagacctggcgcagcgtgtccagctgtgggagcacttccagagcctgctgtggacctacagccgcctgcgggagcaggagcagtgcttcgccgtggaggccctggagcgactgattcacccccagctctgtgagctgtgcatagaggcgctggagcggcacgtcatccaggctgtcaacaccagccccgagcggggaggcgaggaggccctgcatgccttcctgctcgtgcactccaagctgctggcattctactctagccacagtgccagctccctgcgcccggccgacctgcttgccctcatcctcctggttcaggacctctaccccagcgagagcacagcagaggacgacattcagccttccccgcggagggcccggagcagccagaacatccccgtgcagcaggcctggagccctcactccacgggcccaactggggggagctctgcagagacggagacagacagcttctccctccctgaggagtacttcacaccagctccttcccctggcgatcagagctcaggtgaggaccggaggaaagcaggaggaaacaatagctagctgcgagcgacaggcagcccaggacatctgtcttaggctccagtggacccccgtgcctcctaaggcttgagtgcaggtacccgtgttcctagagcacaggacgctgtctgcggctccccatcttccctgccagctccagcctgaactcaaggattgttaagaccactccactgatccctaaagctgttgatgacaagttgattcatttaaaacttctgtacatgcattctcagactcatcttttttgtaattaaaattaaaaattaagttaaatttagtaataatcatctaatttctatacattctaaaatatattcagcatctgtagtttatactttgtttctccaaagtatgtgggtaaacaataaaaaaaaactataaatattcaaaaaaaa

SEQ ID NO: 6829 - DNA, 1473 bp, Homo Sapiens
  NM_182640
attagcgcctgcgccgtctctaggccccgccccctcacccctccggtcctggagctcccacagctaacatggcggcgccctgtgtgtcctacggcggagcagtttcgtaccggcttcttctctggggtaggggtagcctcgcccggaagcaaggcctctggaaaaccgcggcccctgagttgcaaacaaatgtcagatcccagatattaaggctaagacatactgcatttgtaataccaaagaaaaacgttcctacctcaaaacgtgaaacttacacagaggattttattaaaaagcagattgaagagttcaacataggaaagagacatttagccaacatgatgggagaagatccagaaactttcactcaagaagatattgacagagctattgcttaccttttcccaagtggtttgtttgagaaacgagccaggccagtaatgaagcatcctgaacagatttttccaagacaaagagcaatccagtggggagaagatggccgtccatttcactatctcttctatactggcaaacagtcatactattcattaatgcatgatgtatatggaatgttactcaatttagaaaaacatcaaagtcacttgcaagccaaaagtctgctcccagaaaaaactgtaaccagagacgtgattggcagcagatggctgattaaggaggaactagaagaaatgttagtggaaaaactgtcagatctagattatatgcagttcattcggctgctagaaaagttattgacatcgcagtgtggtgctgctgaggaagaatttgtgcagaggtttcgaagaagtgtaactcttgaatcaaaaaaacagctgattgaacctgtacagtatgatgagcaaggaatggcctttagcaaaagtgaaggtaaaagaaagactgcaaaagcagaagcaattgtttataaacatggaagtggaagaataaaagtaaatggaattgattaccagctttacttcccgatcacacaggacagagaacagctgatgttccctttccactttgttgaccggctgggaaagcacgacgtgacctgcacagtctcagggggcgggaggtcagcgcaggctggagcaatacgactggcaatggcaaaagccttgtgcagctttgtcaccgaggacgaggtcgagtggatgagacaagctggactacttactactgatccacgtgtgagggaacggaagaagccaggccaagagggagcccgcagaaagtttacgtggaagaaacgctaagggtttgctcccaggaaaggagaggaagagctatatatatgtgccgacatgtggcagacacacagtaaataatggctgaccagcatgagggcagtactgtcagaaatttctttgagctgtgagatggatttatttttaaatgctactttgtaaaggtgacctttaaaaaataaaaggaaaataaagaatgttagtttcaaaaaaaaaaaaaaaa

SEQ ID NO: 6830 - DNA, 5935 bp, Homo Sapiens
  NM_182648
cttttcccatcgtgtagtcaagagtctgtgccagacttgaaggctttactttgttagccatgtgtttatgaacccccagcgctttccctagatcttttggctgataatctcaaacatggaggatgcttctgaatcttcacgaggggttgctccattaattaataatgtagttctcccaggctctccgctgtctcttcctgtatcagtgacaggctgtaaaagtcatcgagtagccaataaaaaggtagaagcgaggagtgaaaagctcctcccaacagctcttcctccttcagagccgaaagtagatcagaaacttcccaggagctccgagaggcggggaagtggcggtgggacgcaattccccgcgcggagtcgggcagtggcagcgggagaagcggcagccaggggcgcggcggggccggagagaggcggtcccctgggaggacggggtctcccctcgttgcctttgtagtggagaaggtggacaagtggcagtcggcgtgatcgcagggaagcggggccggcgcgggcggccgagggtccaggcgagcccgcgggcggacgggagatgccgctgctacaccgaaagccgtttgtgagacagaagccgcccgcggacctgcggcccgacgaggaagttttctactgtaaagtcaccaacgagatcttccgccactacgatgacttttttgaacgaaccattctgtgcaacagccttgtgtggagttgtgctgtgacgggtagacctggactgacgtatcaggaagcacttgagtcagaaaaaaaagcaagacagaatcttcagagttttccagaaccactaattattccagttttatacttgaccagccttacccatcgttcgcgcttacatgaaatttgtgatgatatctttgcatatgtcaaggatcgatattttgtcgaagaaactgtggaagtcattaggaacaatggtgcaaggttgcagtgtaggattttggaagtcctccctccatcacatcaaaatggttttgctaatggacatgttaacagtgtggatggagaaactattatcatcagtgatagtgatgattcagaaacacaaagctgttcttttcaaaatgggaagaaaaaagatgcaattgatcccttactattcaagtataaagtgcaacccactaaaaaagaattacatgagtctgctattgttaaagcaacacaaatcagccggagaaaacacctattttctcgtgataaactaaagctttttctgaagcaacactgtgaaccacaagatggagtcattaaaataaaggcatcatctctttcaacgtataaaatagcagaacaagatttttcttatttcttccctgatgatccacccacatttatcttcagtcctgctaacagacgaagagggagacctcccaaacgaatacatattagtcaagaggacaatgttgctaataaacagactcttgcaagttataggagcaaagctactaaagaaagagataaacttttgaaacaagaagaaatgaagtcactggcttttgaaaaggctaaattaaaaagagaaaaagcagatgccctagaagcgaagaaaaaagaaaaagaagataaagagaaaaagagggaagaattgaaaaaaattgttgaagaagagagactaaagaaaaaagaagaaaaagagaggcttaaagtagaaagagaaaaggaaagagagaagttacgtgaagaaaagcgaaagtatgtggaatacttaaaacagtggagtaaacctagagaagatatggaatgtgatgaccttaaggaacttccagaaccaacaccagtgaaaactagactacctcctgaaatctttggtgatgctctgatggttttggagttccttaatgcatttggggaactttttgatcttcaagatgagtttcctgatggagtaaccctagaagtattagaggaagctcttgtaggaaatgacagtgaaggcccactgtgtgaattgctttttttcttcctgactgcaatcttccaggcaatagctgaagaagaagaggaagtagccaaagagcaactaactgatgctgacaccaaaggctgcagtttgaaaagtttggatcttgatagctgcactctttcagaaatcctcagactgcacatcttagcttcaggtgctgatgtaacatcagcaaatgcaaagtatagatatcaaaaacgaggaggatttgatgctacagatgatgcttgtatggagcttcgtttgagcaatcccagtctagtgaagaaactgtcaagcacctcagtgtatgatttgacaccaggagaaaaaatgaagatactccatgctctctgtggaaagctactgaccctagtttcaactagggattttattgaagattatgttgatatattacgacaggcaaagcaggagttccgggaattaaaagcagaacaacatcgaaaagagagggaagaagcagctgccagaattcgtaaaaggaaggaagaaaaacttaaggagcaagaacaaaaaatgaaagagaaacaagaaaaactgaaagaagatgagcaaagaaattcaacggcagatatatctattggggaggaagaaagggaagattttgatactagcattgagagcaaagacacagagcaaaaggaattagatcaagatatggtcactgaagatgaagatgacccaggatcacataaaagaggcagaagggggaaaagaggacaaaatggatttaaagaatttacaaggcaagaacagatcaactgtgtaacaagagagcctcttactgctgatgaggaagaagcattaaaacaggaacaccaacgaaaagagaaagagctcttagaaaaaatccaaagtgccatagcctgtaccaatatctttcccttgggtcgcgaccgcatgtatagacgatactggattttcccttctattcctggactctttattgaagaggattattctggtcttactgaagacatgctgttgcctagaccttcatcatttcagaataatgtacagtctcaagatcctcaggtatccactaaaactggagagcctttgatgtctgaatctacctccaacattgaccaaggtccacgtgaccattctgtgcagctgccaaaaccagtgcataagccaaatcggtggtgcttttacagttcttgtgaacagctagaccagcttattgaagctcttaattctagaggacatagagaaagtgccttaaaagaaactttgttacaagagaaaagcagaatatgtgcacagctagcccgtttttctgaagagaaatttcatttttcagacaaacctcagcctgatagcaaaccaacatatagtcggggaagatcttccaatgcatatgatccatctcagatgtgtgcagaaaagcaacttgaactaaggctgagagattttcttttagatattgaagatagaatctaccaaggaacattaggagccatcaaggttacagatcgacatatctggagatcagcattagaaagtggacggtatgagctgttaagtgaggaaaacaaggaaaatgggataattaaaactgtgaatgaagacgtagaagagatggaaattgatgaacaaacaaaggtcatagtaaaagacagacttttggggataaaaacagaaactccaagtactgtatcaacaaatgcaagtacaccacaatcagtgagcagtgtggttcattatctggcaatggcactctttcaaatagagcagggcattgagcggcgttttctgaaagctccacttgatgccagtgacagtgggcgttcttataaaacagttctggaccgttggagagagtctctcctttcttctgctagtctatcccaagtttttcttcacctatccaccttggatcgtagcgtgatatggtctaaatctatactgaatgcgcgttgcaagatatgtcgaaagaaaggcgatgctgaaaacatggttctttgtgatggctgtgataggggtcatcatacctactgtgttcgaccaaagctcaagactgtgcctgaaggagactggttttgtccagaatgtcgaccaaagcaacgttctagaagactctcctctagacagagaccatccttggaaagtgatgaagatgtggaagacagtatgggaggtgaggatgatgaagttgatggcgatgaagaagaaggtcaaagtgaggaggaagagtatgaggtagaacaagatgaagatgactctcaagaagaggaagaagtcagcctacccaaacgaggaagaccacaagttagattgccagttaaaacaagagggaaacttagctcttctttctcaagtcgtggccaacaacaagaacctggaagatacccttcaaggagtcagcagagcacacccaaaacaactgtttcttctaaaactggtagaagcctaagaaagataaactctgctcctcctacagaaacaaaatctttaagaattgccagtcgttctactcgccacagtcatggcccactgcaagcagatgtatttgtggaattgcttagtcctcgtagaaaacgcagaggcaggaaaagtgctaataatacaccagaaaatagtcccaacttccctaacttcagagtcattgccacaaagtcaagtgaacagtcaagatctgtaaatattgcttcaaaactttctctccaagagagtgaatccaaaagaagatgcagaaaaagacaatctccagagccatcgcctgtgacactgggtcgaaggagttctggccgacagggaggagttcatgaattgtctgcttttgaacaacttgttgtagaattggtacgacatgatgacagctggccttttttgaaacttgtttctaaaatccaggtcccagactactatgacatcatcaaaaagcccattgccttaaatataattcgtgaaaaagtgaataagtgtgaatataaattagcatctgagtttattgatgacattgagttaatgttttcgaactgctttgaatacaaccctcgtaacacaagtgaagcaaaagctggaactaggcttcaagcattttttcatattcaggctcaaaagcttggactccacgtcacacccagtaatgtggaccaagttagcacaccaccggctgcgaaaaagtcacgaatctgactttgtccttctaaaggatatatttgaagaaaaacaaattgttcatgaaaatggaacattaaatcatgctgtataaagcaataacaattgattgaccacatgaaagtgtggcctgcactatattctcaattttaatattaagcactcaggagaatgtaggaaagatatcctttgctacagttttgttcagtatctaataagtttgatagatgtattggatacagtactggtttacagaggtttttgtacatttttgagatcattcatgtgtccagagatcttggaaaatattttttcacccacgatttattttgttattgatgatttttttttaaagtggtggtattaagggagagttatctacatggatgagtcttccgctatagcacagtttagaaaaggtgtttatgtcttaattaattgtttgagtacattctttcaacactacacatgaatgaatccaatcttataaccttgaagtgctgtaccagtgctggctgcaggtattaagtccaagtttattaactagatatttatttagtattgagagtaatttgtgaatttgttttgtatttataaaatttatacctgaaaaatgttccttaatgttttaaaccttttactgtgtttttattcctctaacttccttaatgatcaatcaaaaaaagtaacaccctccctttttcctgacagttctttcagctttacagaactgtattataagtttctatgtataactttttaactgtacaaataaaataacattttttcaaataaaaaaaaaaaaaaaaa

SEQ ID NO: 6831 - DNA, 3040 bp, Homo Sapiens
  NM_182661
cactgtttcttggtagtttgacttcacttttgttgaagtttatcgcgtcaagaaattccagtttacgtcgaagcacatggaggatgaggacagcgacctcaaggagggggggaagaagcgctttgggcacatttgcagcagccacccctcctgctgctgcaccgtctccaacagctcctggaactgcgacggggaggtcctgcacagccctgccatcgaggtcagagtccactgccagctggttcgactctttgcacgaggaattgaagagaatccgaagccagactcacacagctgagaagccggcgtcctgctcacaaactgggaaagtgtgaaaactatttaagataattattacagaccaattatgttgatatatacatttaaatgtagaaatttatttttgatagttaaatcttgattttagaagaaaacccttttgtcaacaattttgtgtacatatttggcattttcagttctgtacgcatctgcgggttgcagcccacgccgcttactctcagcggatgcagctgctcacttgggggcactggcctcttaggttttaacgatgtcaacagtgtagtttagaaaatggcccgttagtggctctattgcaataatgttagggacattatatgatttccacgcaggtcacaccatctgggcctgaggtagcagtgggtcactttgatccactttgcaggacttattctgtaacggtttgtggccaagttttgggaagtggttgattctctttgccttcatttcaccttcctcttcgtttacggttaggacatcgctgcttgatccttacaatactgtgcaactgcaatgcaacgtggccctgcttcaggtgatccgcgggaggggcctccacgccagcgccgggaaggctgctggggcctccacacctgcctcatcacggcggcgaggctacgacaatccggctgggagcatgaccttggcgtctgttctgggagcacggatgataagctctggaagctggcagtgtgtaaagcactggcaagtttgttactgttaaaatgtcaaataccaatgctttatatcgacgcgaagtgcttaacacagccgggcttgggggcagtcaggaggaagctggccatccgtggaggaggggccggtcctggactcccgcaggactcctctgaggcagggcctgaagtctgtacacgtggtccagatttgtccttgtcttttcttcacactgagttctctatatttattgaacatcttgtccttttaagccagagtagtgtaaactgcgtctcggatgtctgtcttttgcctcgaagccacgatggatcgctggtttcctctgcagcgcgagggctccggcgaccagaggattcttcccggaaggcattcctgccgcgctccccggggcacccctcaattgtgtactacgtccttgtttagtgtgtatccgtgcccacgtagatgatgtctgtaacgtagttttgtttgaaatatgagaatatgcggcttaaactttgatctgtaaggagcggggccgtggccgtttggagcacgctgtagacaccgttcctcatgctgccgggtgggttttgcagaagctcccttagtgatttcatgtttaacaggcagcatccattttcagaatttcctggcattgatttatattttgaagcatacaggaaacttctcgtttcctcgtttagccccacccagatcaggtgaaagggcagctttaatggtggtttttatggaccacattatcagagagcactgtgcaagccaaatggttcaataatgaatgaaaattctgggtgtaaagagtaaatatgccctggctctttctaccaatgtttgctcctggttggaaagaaaccaaagatttaagacgggctgctcttccagactggctgtgcctgcctgtgcccagcaacctgtgcagccggcagtgtgcctggtgtcacgccaggaggctgtggctgctgtgggccctctggaattgtgctcctcacaaagtttccccaaaaggttcttctaagcctttattgtccctggtaaatgtttcccggctgggcgcggtggctcacgcctgtaatcccagcactttgggaggccgaggcgggtggatcacctaaggtcaggagtttgagatcagcctgcccaacatggtgaaacctcgtctctactaaaaatacacaacttagccagtcttgttggcgcacgcctgtaatctcagctactagggatgctgaggcaggagaatcgcttgaacccaagaaagaggtggaggttgcggtgagccaagattgcgccactgcactccagcctgggcaaacagagggagactccatcgccccccccaacaaaaaaaaaagtttcccatacactggcctgccccaaaacccactaacaattttagcaaaacagtccaggccaaagaggaagcatttcatgttcaataagaaacccagccattccgcatggctggttcctgagtggctctggtgatactctccagccacctgctgacattcagaatctcagacctcgggactgctgttgcggtaccgtgtgtctgacacctgccagcagccctttgctatctgcgcgcaggatgggggtgactgcccagacattcccgctagataggctctgatttccggggcagcctttcagatgcggcagacatacaacacctgtactttagagttttaagggaaaaaaaatcagaagtgctggttagatagtaaaaacttaggataacttagaaaggctagttttagcttcctttgtggctccctggtgcaaaacaattagcagttatgcaatggacctgattctagtttattctaattaagaagtgaggccgagtttgacttcgttcctgaatacaatcttgagtaactgggaaagtctgagtgaaaggatggcctcattctctttctaatcttgctggtttcaagattagaaaatggcattatttgatctgaaatgtttgagaagacacgaataaagttacttgggcagaaaaaaaaaaaaaaaaaaa

SEQ ID NO: 6832 - DNA, 1794 bp, Homo Sapiens
  NM_182666
aggaggaggaggcggcggcggaggagtggtgtgtgtgcgagcgtgtgtggctgggggaagccattgcctgtttaatagttgctgttgctgcacttccgcttctctcccagcgagagagagacacgagtggccaggcccagccgcagccgcagcagcagccgccgcggcggcacggaggagccagacacaaagagaggggctgtttgcggggtggggtggggggttcgctatgtcggatgacgattcgagggccagcaccagctcctcctcatcttcgtcttccaaccagcaaaccgagaaagaaacaaacacccccaagaagaaggagagtaaagtcagcatgagcaaaaactccaaactcctctccaccagcgccaagagtgctggtcccaaaggcgataacatctatgaatggagatcaaccattctagggcctccaggatccgtgtatgagggtggtgtattctttctcgatatcacttttacaccagaatatcccttcaagcctccaaaggttacatttcggacaagaatctatcattgtaatattaacagtcaaggtgttatttgcttggacatattgaaagataattggagtccagcactaaccatttctaaagtcctcctttctatctgctcacttcttacagactgtaatcctgccgaccccttggtgggaagtattgccactcagtatatgaccaacagagcagaacatgacagaatggccagacagtggaccaagagatacgctacataaattggggtttcacaattcttacattatttgtctgtcacagaagagagctgcttatgattttgaaggggtcagggagggtgggagttggtaaagagtagggtatttctataacagatattattcagtcttatttcctaagattttgttgtaacttaaggtatcttgctacagtagacagaattggtaatagcaacttttaaaattgtcattagttctgcaatattagctgaaatgtagtacagaaaagaatgtacatttagacatttgggttcagttgcttgtagtctgtaaatttaaaacagcttaatttggtacaggttacacatatggccatttatgtaaagtccctctaagactacatactttttgtttaaaacaaaattggaatttgttttcccttcttggaagggaacattgatatttaacagagtttttagagattgtcatctcatatatataaaatggacacgtggctataaaacaccatataagagatgagtagtgcgttttattttatatgccaatctactttgtttaaaaaaggtctgaatcaggacttgtgaaaacctgtagtgaaataccttaagctgttaactaactgtaaggcgtggaataggagttgctcagtggattggttctatgttgtggactacttaagtctgcatttgttactgtgctaataaacaatattaaaaaccacctaataaacactgctgtgttcatttacttttcttttgccttttggttgccattcgcagattcttctgaaatcgataggtatctgcttctaaaacaagctaaaaataatgcatatttagtaggtattagttagttacctatattaggatctgtactttacacagctgtagatgaggtatcctagaaaaggttaaataatctaccccatttaggcttcaaagacgaaccctactgcatctttttaaaagcattttctgacttgcagatgctgtagtagcaagtacatgagaaatgggttccgtcatggataaattggtaccctgccttagggggca

SEQ ID NO: 6833 - DNA, 1589 bp, Homo Sapiens
  NM_182676
ccgtcgcccggatcccctgagctgcccgccatcccacgtgaccgcgccgccccccagctccaccgctgagcccgctcgccatggccctcttcggggccctcttcctagcgctgctggcaggcgcacatgcagagttcccaggctgcaagatccgcgtcacctccaaggcgctggagctggtgaagcaggaggggctgcgctttctggagcaagagctggagactatcaccattccggacctgcggggcaaagaaggccacttctactacaacatctctgaggtgaaggtcacagagctgcaactgacatcttccgagctcgatttccagccacagcaggagctgatgcttcaaatcaccaatgcctccttggggctgcgcttccggagacagctgctctactggttcttgaaggtgtatgattttctctccacgttcatcacctcagggatgcgcttcctcctcaaccagcagatctgccctgtcctctaccacgcagggacggtcctgctcaactccctcctggacaccgtgcctgtgcgcagttctgtggacgagcttgttggcattgactattccctcatgaaggatcctgtggcttccaccagcaacctggacatggacttccggggggccttcttccccctgactgagaggaactggagcctccccaaccgggcagtggagccccagctgcaggaggaagagcggatggtgtatgtggccttctctgagttcttcttcgactctgccatggagagctacttccgggcgggggccctgcagctgttgctggtgggggacaaggtgccccacgacctggacatgctgctgagggccacctactttgggagcattgtcctgctgagcccagcagtgattgactccccattgaagctggagctgcgggtcctggccccaccgcgctgcaccatcaagccctctggcaccaccatctctgtcactgctagcgtcaccattgccctggtcccaccagaccagcctgaggtccagctgtccagcatgactatggacgcccgtctcagcgccaagatggctctccgggggaaggccctgcgcacgcagctggacctgcgcaggttccgaatctattccaaccattctgcactggagtcgctggctctgatcccattacaggcccctctgaagaccatgctgcagattggggtgatgcccatgctcaatgagcggacctggcgtggggtgcagatcccactacctgagggcatcaactttgtgcatgaggtggtgacgaaccatgcgggattcctcaccatcggggctgatctccactttgccaaagggctgcgagaggtgattgagaagaaccggcctgctgatgtcagggcgtccactgcccccacaccgtccacagcagctgtctgagccctcaatccccaagctggcagctgtcattcaggaccccaacccctctcagcccctcttttcccacattcatagcctgtagtgccccctctaacccccagtgccacagagaagacgggatttgaagctgtacccaatttaattccataatcaatctatcaattacagtccgtccaccacctc

SEQ ID NO: 6834 - DNA, 2172 bp, Homo Sapiens
  NM_182679
aaaacggcatttccgggaagatggcggcgcacaagtcaggtccggcacatgtttccgcggagcggacccagcaatgacggatgatatcacctcttcttctctggtgagagtctgaggatagagacttttttctcaccatgaatgtcaccccagaggtcaagagtcgtgggatgaagtttgctgaggagcagctgctaaagcatggatggactcaaggcaaaggcctcggccggaaggagaatggtatcactcaggctctcagggtgacactgaagcaagacactcatggggtaggacatgaccctgccaaggagttcacaaaccactggtggaatgagctcttcaacaagactgcggccaacttggtagtggaaactgggcaggatggagtacagataaggagcctttctaaggagaccacccgttataatcatcccaagcccaacttgctgtatcagaagtttgtgaagatggctacattgacttcaggtggagagaagccaaacaaagacttggagagctgcagtgatgacgacaaccaggggtccaagtccccaaagattctgactgatgagatgctgctccaagcctgtgaggggcgaacagcacacaaggctgcccgtcttgggatcacaatgaaggccaagcttgctcgcctagaggcccaggagcaggccttcctggctcgtctcaaaggccaggaccctggggcccctcaactgcagtcagagagcaagccccccaaaaaaaagaaaaagaaaaggaggcagaaagaggaggaagaagctacagcatctgaaaggaatgatgcagatgagaagcacccagaacatgctgagcagaacatcagaaaaagcaagaagaagaaaaggcgacatcaagaaggaaaggtctcagatgaaagagagggtacaactaaagggaatgagaaggaggacgctgcaggaacaagtgggcttggggaattgaatagcagagagcaaaccaatcagtccctcaggaaagggaagaaaaagaagaggtggcaccatgaagaggagaagatgggggtcttggaggaaggaggaaaaggcaaggaggctgcaggcagtgtcaggacagaggaggtagagagcagggcatatgctgacccatgcagccgaagaaagaagaggcagcaacaggaggaggaggacttgaacctagaagatagaggtgaggaaacttttaggtggtggaaccagggaagcagagagcagagcatgcagtgatggaagaagcaggaaaagcaagaagaaaagacagcagcatcaagaggaggaggacatcttggatgtaagggatgagaaggatggcggggctagggaagcagagagcagagcacacactggctcaagcagcagaggtaagaggaagaggcagcagcatcccaagaaggaaagagctggagtcagcactgtccagaaagccaaaaagaaacagaagaagagagactaaaggtctggtaaaggtagggctcaattgattgattttcaggagttgaagcctcaaagaccagggttgatgcaggtctgcaggtcttctgcacccccctcaatgaggagtccctcccagaaaggaaactgatctctgggacgtcagctgctgagaggagcaagcggtagtaccaccccttagttgagggagtcagcacagtcctttctgcagcttctaacccaggaccatgaactcaggtgcctagagaagccaggcagctaaaggacaaggaatgctgggggctgtgggaacaggaatgcagataccctttgaaggagcattcctgctaaaagaagctgaaaatgtagacctatgtgaagtgctctgatttctaaatattgtgaaggttaagaaaaacataaatttaggtctatgggctagatttagcccacagttgccagtttctagcgctaccaaatgaatgaataaacatgagcttgcgctcctagcctagagataaatcctgactggcatctctgttcccagcctgggaaggtcctgaatacaaattagaagatattccttggaggcctttgaagaaattccttcggttaacctctttgtagtcttgctacactgataagtagaagtagctccctgtctgtgtcccaaatgaataagaattgtgtaaaggacagcaaaaaaaaaaaaaaaaaa

SEQ ID NO: 6835 - DNA, 2225 bp, Homo Sapiens
  NM_182687
gagcctcggagcccgggcacccctgacgggctgcactggggagggggaggagcctcgaggccggtttggaatttttggcgcgagcagctccgcgcgcgttcacgggccgttccccctcacgggagtcctccgcccgggcgtccggaacagtcgacggcagactccggcccgctgagccacccgaggggtcccgtggcctccgcggacccggaatctgggccctcgcggacccgcgccccgcccagtcgccccagggcttccccacacccacggagtgaagtcagccgcggccctgcctgggaggaacttaccgtctaccgggaaaggtggccagcagatgtgtcgggcctggtgagagggtgaggcgagacggcccgatcgcccagggccccggaagctgcggaggtcacccccgcctggccttagctcagggacaccctggattcacgtgggagcccctgctcctgcctcccccgtcccaccactgaggctgttgggccaggccagtcatgctagaacggcctcctgcactggccatgcccatgcccacggagggcaccccgccacctctgagtggcacccccatcccagtcccagcctacttccgccacgcagaacctggattctccctcaagaggcccagggggctcagccggagcctcccacctccgccccctgccaagggcagcattcccatcagccgcctcttccctcctcggaccccaggctggcaccagctgcagccccggcgggtgtcattccggggcgaggcctcagagactctgcagagccctgggtatgacccaagccggccagagtccttcttccagcagagcttccagaggctcagccgcctgggccatggctcctacggagaggtcttcaaggtgcgctccaaggaggacggccggctctatgcggtaaagcgttccatgtcaccattccggggccccaaggaccgggcccgcaagttggccgaggtgggcagccacgagaaggtggggcagcacccatgctgcgtgcggctggagcaggcctgggaggagggcggcatcctgtacctgcagacggagctgtgcgggcccagcctgcagcaacactgtgaggcctggggtgccagcctgcctgaggcccaggtctggggctacctgcgggacacgctgcttgccctggcccatctgcacagccagggcctggtgcaccttgatgtcaagcctgccaacatcttcctggggccccggggccgctgcaagctgggtgacttcggactgctggtggagctgggtacagcaggagctggtgaggtccaggagggagacccccgctacatggcccccgagctgctgcagggctcctatgggacagcagcggatgtgttcagtctgggcctcaccatcctggaagtggcatgcaacatggagctgccccacggtggggagggctggcagcagctgcgccagggctacctgccccctgagttcactgccggtctgtcttccgagctgcgttctgtccttgtcatgatgctggagccagaccccaagctgcgggccacggccgaggccctgctggcactgcctgtgttgaggcagccgcgggcctggggtgtgctgtggtgcatggcagcggaggccctgagccgagggtgggccctgtggcaggccctgcttgccctgctctgctggctctggcatgggctggctcaccctgccagctggctacagcccctgggcccgccagccaccccgcctggctcaccaccctgcagtttgctcctggacagcagcctctccagcaactgggatgacgacagcctaggccctggacaccctccttgtctcgcctgccctcctgcaggccttcactctcccctgaggctgtcctggcccggactgtggggagcacctccaccccccggagcaggtgcacacccagggatgccctggacctaagtgacatcaactcagagcctcctcggggctccttcccctcctttgagcctcggaacctcctcagcctgtttgaggacaccctagacccaacctgagccccagactctgcctctgcacttttaaccttttatcctgtgtctctcccgtcgcccttgaaagctggggcccctcgggaactcccatggtcttctctgcctggccgtgtctaataaaaagtatttgaaccttgggagcacccaagcttgctcatgtggcaaaaaaaaaaaaaaaaaa

SEQ ID NO: 6836 - DNA, 3737 bp, Homo Sapiens
  NM_182691
tttccctttatagcaccattgaatcccagtcctaacagaagtactgcgaatcttgtggcctcattctgaacaaaagggattagagaagaaaaatctcttgatataaggcttgaaagcaagggcaggcaatcttggttgtgaatattttctgatttttccagaaatcaagcagaagattgagctgctgatgtcagttaactctgagaagtcgtcctcttcagaaaggccggagcctcaacagaaagctcctttagttcctcctcctccaccgccaccaccaccaccaccgccacctttgccagaccccacacccccggagccagaggaggagatcctgggatcagatgatgaggagcaagaggaccctgcggactactgcaaaggtggatatcatccagtgaaaattggagacctcttcaatggccggtatcatgttattagaaagcttggatgggggcacttctctactgtctggctgtgctgggatatgcaggggaaaagatttgttgcaatgaaagttgtaaaaagtgcccagcattatacggagacagccttggatgaaataaaattgctcaaatgtgttcgagaaagtgatcccagtgacccaaacaaagacatggtggtccagctcattgacgacttcaagatttcaggcatgaatgggatacatgtctgcatggtcttcgaagtacttggccaccatctcctcaagtggatcatcaaatccaactatcaaggcctcccagtacgttgtgtgaagagtatcattcgacaggtccttcaagggttagattacttacacagtaagtgcaagatcattcatactgacataaagccggaaaatatcttgatgtgtgtggatgatgcatatgtgagaagaatggcagctgaggccactgagtggcagaaagcaggtgctcctcctccttcagggtctgcagtgagtacggctccacagcagaaacctataggaaaaatatctaaaaacaaaaagaaaaaactgaaaaagaaacagaagaggcaggctgagttattggagaagcgcctgcaggagatagaagaattggagcgagaagctgaaaggaaaataatagaagaaaacatcacctcagctgcaccttccaatgaccaggatggcgaatactgcccagaggtgaaactaaaaacaacaggattagaggaggcggctgaggcagagactgcaaaggacaatggtgaagctgaggaccaggaagagaaagaagatgctgagaaagaaaacattgaaaaagatgaagatgatgtagatcaggaacttgcgaacatagaccctacgtggatagaatcacctaaaaccaatggccatattgagaatggcccattctcactggagcagcaactggacgatgaagatgatgatgaagaagactgcccaaatcctgaggaatataatcttgatgagccaaatgcagaaagtgattacacatatagcagctcctatgaacaattcaatggtgaattgccaaatggacgacataaaattcccgagtcacagttcccagagttttccacctcgttgttctctggatccttagaacctgtggcctgcggctctgtgctttctgagggatcaccacttactgagcaagaggagagcagtccatcccatgacagaagcagaacggtttcagcctccagtactggggatttgccaaaagcaaaaacccgggcagctgacttgttggtgaatcccctggatccgcggaatgcagataaaattagagtaaaaattgctgacctgggaaatgcttgttgggtgcataaacacttcacggaagacatccagacgcgtcagtaccgctccatagaggttttaataggagcggggtacagcacccctgcggacatctggagcacggcgtgtatggcatttgagctggcaacgggagattatttgtttgaaccacattctggggaagactattccagagacgaagaccacatagcccacatcatagagctgctaggcagtattccaaggcactttgctctatctggaaaatattctcgggaattcttcaatcgcagaggagaactgcgacacatcaccaagctgaagccctggagcctctttgatgtacttgtggaaaagtatggctggccccatgaagatgctgcacagtttacagatttcctgatcccgatgttagaaatggttccagaaaaacgagcctcagctggcgaatgccttcggcatccttggttgaattcttagcaaattctaccaatattgcattctgagctagcaaatgttcccagtacattggacctaaacggtgactctcattctttaacaggattacaagtgagctggcttcatcctcagacctttattttgctttgaggtactgttgtttgacattttgctttttgtgcactgtgatcctggggaagggtagtcttttgtcttcagctaagtagtttactgaccattttcttctggaaacaataacatgtctctaagcattgtttcttgtgttgtgtgacattcaaatgtcatttttttgaatgaaaaatactttcccctttgtgttttggcaggttttgtaactatttatgaagaaatattttagctgagtactatataatttacaatcttaagaaattatcaagttggaaccaagaaatagcaaggaaatgtacaattttatcttctggcaaagggacatcattcctgtattatagtgtatgtaaatgcaccctgtaaatgttactttccattaaatatgggagggggactcaaatttcagaaaagctaccaagtcttgagtgctttgtagcctatgttgcatgtagcggactttaactgctccaaggagttgtgcaaacttttcattccataacagtcttttcacattggattttaaacaaagtggctctgggttataagatgtcattctctatatggcactttaaaggaagaaaagatatgtttctcattctaaaatatgcattataatttagcagtcccatttgtgattttgcatatttttaaaagtacttttaaagaagagcaatttccctttaaaaatgtgatggctcagtaccatgtcatgttgcctcctctgggcgctgtaagttaagctctacatagattaaattggagaaacgtgttaattgtgtggaatgaaaaaatacatatatttttggaaaagcatgatcatgcttgtctagaacacaaggtatggtatatacaatttgcagtgcagtgggcagaatacttctcacagctcaaagataacagtgatcacattcattccataggtagctttacgtgtggctacaacaaattttactagctttttcattgtctttccatgaaacgaagttgagaaaatgattttccctttgcaggttgcacacagttttgtttatgcatttccttaaaattaattgtagactccaggatacaaaccatagtaggcaatacaattttagaatgtaatatatagaggtatatttagcctcttttagaagtcagtggattgaatgtctttttattttaaattttacattcattaaggtgcctcgtttttgactttgtccattaacatttatccatatgcctttgcaataactagattgtgaaaagctaacaagtgttgtaacaataatccattgtttgaggtgcttgcagttgtcttaaaaattaaagtgttttggtttttttttttccaaaaaaaaaaaaaaaaaaaaaa

SEQ ID NO: 6837 - DNA, 3895 bp, Homo Sapiens
  NM_182705
gtctgcgcccctcgctgtcccgcgaccccggcgcgggtgcctcgggcccccctcgcgcgccgccatggtgggccggctgagcctacaggatgtgcccgagctcgtggacgcgaagaagaagggcgacggcgtcctggacagcccggactcggggctgccccccagccccagccccagccactgggggctcgcggcgggcggaggcggcggagagcgcgcggcggcaccggggacgctggagcccgacgcggcggcggcgacccccgcggctccgagtccagcgtctctccccctggctcccggctgtgcgctgaggctttgtcccctgtcctttggcgaaggagtggagtttgaccccttaccaccaaaggaagtaaggtacacctccttggtcaagtacgactccgagaggcacttcatcgacgacgtgcagctgcccctgggcctggcggtggcctcctgcagccagacggtcacctgtgtccccaatggcacgtggcgcaactacaaggccgaggtgcgcttcgagccacgccacaggcccacccgcttcctcagtaccaccatcgtgtaccccaagtaccccaaggccgtctacaccaccaccctggattacaactgccgcaagacgctgaggaggtttctgtccagcgtggagctcgaagccgcggagctcccgggcagcgacgacctctctgatgaatgctgacccagcaggctgggctggggtcggaccggctctcccgctgtcctgcccccgactgccctggccaagctgggcgaccttacccttcacgtcattccagccccagaggagtctaacctagagatacctccaagcgcggccgggggaagagaaaaaaaagaaaaaatcactgcatctcataattattgagatctttgtgttgtaattttcaagctgtttttagagggaatatatgtcctggtttgctgctgtgttgtttccccaaagtctcaatcagatgaggcaacaaaaagaccaccagaattgcaggaaagcagcagcagtctgggatagggaggggggaggagagctctccctccgtggtcagtttgtcagaagaaaagcatggaaaaagtgagatttaagaaatctcagccacgggtgtcttcactgcacaaaagtggtgctaattcagtaaacagtgacacctgtgtgggttcaatctgtggagagttgagttccattcctttgtttttaaatttccacctccatttgtgtttcctattaacctaaactcttgtaattctctaaatcttttttcatgatataaaaaaaaaagaaaatcccaaaccacaatttaagatgccttttttttttaaaaaaaaaggttctccgtgttgccacctgctccgggaaggccaggccgatgggcggccaggtttgggagcagcggcttcggctccgattgcttcctgacggtcagttccaagcacaggctctgagaaacgcctcgaacccttggtatctggtgaccgtctccgcaggcttccgtgagtctccgataggtgttttgggcttttggaatactttcagaatactttcccattttttcataaggcaaaacggagtggacggcctttttttgagagaaacagcattctaagagtgtgcttggaaaacacactttttgggagtccacgtggggagtggacactcaggacaggaagcggtggccctaagacctgcggccacccggaggaggcagacgcaggcgatgacctggttcatcatgagaggagctagagttgactcagtcttaggatctcgatggcgtcagaattgcagagggtttctgccagtgccttaggtctaattcagaaagcaaggaaggctgggcacggtggctggcgcctgtagtctcagctacttggaaactgaggcaggaggatctcttgagcccaagaattcgagaccggtctggcaacatagtgagcctccatctctaaaaaaaagtggcaaagctgaggaaatctgtgcccccatcccccgacaccagacaagctaaggtgcattcagagtagggaacgatgtcaaaacctggccgccgtggtggcgcgcattcctctcacaccaccgtacggaggcaggtgacagtcaactgaaatgtccccaaggaccgtgtgaattcggctggcgtggcccagcagcggggtggaccagggtgcggtggcttcagacctgcctcccgccaccccgtcctcccctaaccccttcttgggacctcctgccaatccctgtggtgtttgagtaaagaaagtggctgatggttttacttttttcttccaatattggaaagaacaaactagatattccccttgaacacatccaaattatttccagtgcctgagggttaccgagcactgtaagctcagctcggctgtagctccgggtttctgccgatggcctccatctgcgccgaaagctgaactgagccccgcggtgccccggagccacagcagcaggtgcagcgacaatcgccgtcgtgcgcagtcgctggagtcctggagagccacgctgtcctctgcagacaacagcatcagtccgctgtgccccaatgcatcgacgccctgtggacggggcctgcagtccacccgtggtctgagcttgccgggctgaagctcggctgggacccagggaggggccaccctgggacccacagtctcctcagtcacgtgcagagcaaaaaatgcttcctgtgtttggaagagcaagtgacgcagcatttattgataaaaatggatttttctgtctgatttcatgctgtggtcgtttaagtggtcaatgtcttttttttttttttttttgacatggagtctcgctctgttgcccaggctgagtggaatggcgccaactcagctcactgcaaccttcacctcccaggctcaagcgactctcctgcctcagcctcctgagcagctgggattacaggtgcccaccaccacgcccagctaatttttgtatttttagtagagacggggtttcaccatgttggccaggctggtctcgaacacctgaccttgtgatccacccgcctcggcctcccaataatttgtaagttatgttagcgggatcctcaaggccttgctttgccccgtggagacgcttgctcggatgagctcaggaaacagtaccggctgcgtggcaggtctgggtgttgtgtgcgaggacgtggcctttgaacaccgctgtgttctcagaggtccttaggagatatttttttttgtcttagggggactgtgttaagttcagacaaatcatgctgggtgtgtagagagtgtgaaatacgtcagtgaagtaagtagcagtgagcgattgtgaatgtgtaatgtaaatggaaaaccgggttttaccgtgttaagttattcactagggagccagtcgtagttctttgtaatcctctttcttccaaacctgctttgctgaaagttgcagaaaaggaagtgtgtggagagaaacagaacccttcagggtgggtcagaggacgccatccacagtggattcgtgttcgtttgcaggtggaagcagtgatttttaggacccactgattaaaaacaaacattcccaagtgtctctgagagatgctgtttatttgttaattaaaaagcttttttctctgtcttttaaattatggctttcatgtaataaggatatttttagtgaaaaattgttttcctttcaaattacagaccttttaaaaaaacttaatttgagcgagtaccttttcatttgacacttttcctgtttctaaccttaggaaaccagaatagcgtttggcagacacgacgttttcagtttacctttgacacctgccccactccattttgctttgtgatgtcttcatttaacaataaattatctgaaaaaacaaaa

SEQ ID NO: 6838 - DNA, 2079 bp, Homo Sapiens
  NM_182744
gcagatgcaggctgggtgtggagggtgcgagtaggctggagtacaccagggagttcccagcaggccactaggagccacccaggatgcccggcaacctcatgagtcagacaagcagggctgtgtctatctggaagtttccagccaagctaggtaaaacacatggacacagggctctggaggccacgggcatgatgcttcgggtcctggtgggggctgtcctccctgccatgctactggctgccccaccacccatcaacaagctggcactgttcccagataagagtgcctggtgcgaagccaagaacatcacccagatcgtgggccacagcggctgtgaggccaagtccatccagaacagggcgtgcctaggacagtgcttcagctacagcgtccccaacaccttcccacagtccacagagtccctggttcactgtgactcctgcatgccagcccagtccatgtgggagattgtgacgctggagtgcccgggccacgaggaggtgcccagggtggacaagctggtggagaagatcctgcactgtagctgccaggcctgcggcaaggagcctagtcacgaggggctgagcgtctatgtgcagggcgaggacgggccgggatcccagcccggcacccaccctcacccccatccccacccccatcctggcgggcagacccctgagcccgaggacccccctggggccccccacacagaggaagagggggctgaggactgaggcccccccaactcttcctcccctctcatccccctgtggaatgttgggtctcactctctggggaagtcaggggagaagctgaagcccccctttggcactggatggacttggcttcagactcggacttgaatgctgcccggttgccatggagatctgaaggggcggggttagagccaagctgcacaatttaatatattcaagagtggggggaggaagcagaggtcttcagggctctttttttggggggggtggtctcttcctgtctggcttctagagatgtgcctgtgggagggggaggaagttggctgagccattgagtgctgggggaggccatccaagatggcatgaatcgggctaaggtccctgggggtgcagatggtactgctgaggtcccgggcttagtgtgagcatcttgccagcctcaggcttgagggagggctgggctagaaagaccactggcagaaacaggaggctccggcccacaggtttccccaaggcctctcaccccacttcccatctccagggaagcgtcgccccagtggcactgaagtggccctccctcagcggaggggtttgggagtcaggcctgggcaggaccctgctgactcgtggcgcgggagctgggagccaggctctccgggcctttctctggcttccttggcttgcctggtgggggaaggggaggaggggaagaaggaaagggaagagtcttccaaggccagaaggagggggacaaccccccaagaccatccctgaagacgagcatccccctcctctccctgttagaaatgttagtgccccgcactgtgccccaagttctaggccccccagaaagctgccagagccggccgccttctcccctctcccagggatgctctttgtaaatatcggatgggtgtgggagtgaggggttacctccctcgccccaaggttccagaggccctaggcgggatgggctcgctgaacctcgaggaactccaggacgaggaggacatgggacttgcgtggacagtcagggttcacttgggctctctctagctccccaattctgcctgcctcctccctcccagctgcactttaaccctagaaggtggggacctggggggagggacagggcaggcgggcccatgaagaaagcccctcgttgcccagcactgtctgcgtctgctcttctgtgcccagggtggctgccagcccactgcctcctgcctggggtggcctggccctcctggctgttgcgacgcgggcttctggagcttgtcaccattggacagtctccctgatggaccctcagtcttctcatgaataaattccttcaacgcctgtgaaaaaaaaaaaaaaaaaa

SEQ ID NO: 6839 - DNA, 4799 bp, Homo Sapiens
  NM_182749
acgcgcatggaacgcagcgaaggactatggcaggggagaacttcgctacgccgttccacgggcacgtgggccgcggcgccttcagcgacgtgtacgagcccgcggaggacacgtttctgcttttgaacgcgctggaggcagcggctgccgaactggcaggagtggaaatatgcctggaagtagggtcagggtctggtgtagtatctgcattcctagcctctatgataggccctcaggctttgtacatgtgcactgatatcaaccctgaggcagcagcttgtaccctagagacagcacgctgtaacaaagttcacattcaaccagttattacagatttggtaggaagtcacggaatagaggcagcttgggctggtggcaaaaatggtcgggaagtcatggacaggttttttcccctggttccagatctcctttcaccaaaaggattattctatttagttaccattaaagaaaacaacccagaagaaattttgaaaataatgaagacaaaaggtctgcaaggaaccactgcactttccagacaagcaggccaagaaactctttcagtcctcaagttcaccaagtcttagcatacagtgtgtgcccagaactactggaaactgaatgcatttagcatattttgaaactgaagtcattcattaggtaacaaggaattttatcagaaatttgtcattaaaaaaaggtagaaaggtggaacattccctttcagtcaggcctatagaattatttgcacaagtacaagtaaatatgtgtattatatttatagtttgcattttaaatataaaaattatgtatgaaatatttatttcagcattatgtggtaaggcaatggaattgatctggcaaatgtcttttttttcataccagtccataaaggcagtttgctttcagatggcagggccagcaacacaccttcattgtcgtatctccggtgtgtatcagctctccaactctatgtcataattcagttcatggggatcttgattacctttcccttccacaaaatattacactgattggttatatcgatgacattatgctgatttgacctagtgagcaagaagtaggaactacattagacttagtggaaagacatttgcatcagagggtaggaaataaatatgactacaattcaagggccttctaccttagtgaaattggtagggatccagtgacatggggcatgttaggatatttcttctacggtgaaggataagtacttgcatcttgctgctcttaaaaccaagaaagaggcacaatacttagtgggcctctttgggttttggaggcaacattttccaatttcattatgttataccagcctgtttaccaattgactcaaaaagctgctagttttgagtagggcccagaacaagaaaagagtctgcaacaggtccaggctgctgtgcaagctgctctgccacttgggtcatatgatccagcagatccagtggtgtttcagtggcagtggcagatagggatgctgtttgaagcttctggcaggtccctataggtgaatcttggtttaggattttagagcaaagccgtgccattaccaacaaataactagtctctttttgagaaacagctcttggcctgctactgggccttagtagagactgatacttaatgagtcaccaagttaccgtgcaacctgagcttcccatcatgaactggatgttatctgagccaccaacgcacaaagttggatatgcacagcaacactctgtcatcagatggaagtggtatacacatgattgggcctgagaggccctgaaggcacaaggaagttacatgaagaagtaggccaaatttccgtagtccccacttctgctacctgccttctctcttccagcctgcatcggtggcttcatggggacttccctgtgatcagctgacagagaaagagaagacttaggcctggtttacagagtgttctgtatgatatgcaggtaccaccctaaagtggatagctgcagcactacatctcacctctgggctaccttgaaggacagtggtgaagggaaatcctcctggtggacacaactttgagcagtccccctgttgactttgcttagaaggaaaaatagccagatattcaattatatgccaattcataggccgtggccagtggtttggctggatggtcagggagttcaatataactggaaaattggtgacaaagaaatttggagatgaagtatgtggatagacactgaatgggcaaaaagggtgaagatatttgtgccccatgtgaatgctcaccaaagggttagcaaaaaaggattttaataaagtggacaagataacctgttctgtggatactagtaggcctctttctccagccacacctgtcatcacccaattgtttcatgagcaaagtagccatggtgacaagaatagaggttatgcatgggctcagcaacgtggacttctactcaccaaggctgacctggccaaggctatctctgagtgcccagtctgccagcaacagagaccaacactgagcccctgatatgacaccattccccagggtcatcagtcagttgcctagtggcaggttcattacattgatccacctctatcattgaagggatagtgttttatccttactgaaatagatcttactctggatacagattcactttcccttcgcgcagggtgtctgctaaaactaccatccgtggacttacagaatgtctcatctatgaccatggtattccacacagcattacaagaaactcagttcacagcaaaagtgtggcagtgggcccatgatcatggaattttcttaccatgttccctactatcttgaatcaactggctacatagagcagtggaatggcattttgaagacagtaataacaccagctatatagcagtgccttgtagggctgggacaaggttctctagaagactgtctatgctctgaatcaacatccagtatatggtgcatttctcttatgactgggattcacaggtccaggaatcaaggggtcagaataggaaggacaccattcgctattagccctggtgacccactagcaaaatttttgcttcctgttcccatgacttatgcactgctggcctagaggtcttacatagggtggaatattttccactgagagacgcaatcatgatttaattgaactggaagtttaagactgctcctcagccatttggggcttcttatgcctctaactcaatagacaaatgagttacagtgctggctgggtgattgttcctgactaccaagtagaaactggactaccccgaatggtggtaaggtaaagtatgttgggaatacacaggattccttagggcatctcttagtgttatcatgccctgtgattaaggtcaatggaaaactacagcctaattcagacaggaccactaatgatccagacctttcaggaatgaaggtttgggtcaccaccaggtaagtaccatgaccagatgaagtgcttgctgaaggcaaagggaatacagaataaatggtggaataaatactagctttgatcatatgaccagttacagaaacacagactgtgattgtcataagtatgtcctccatattttgctataactacattttgtgtgtgtgtagctttgttttcttctcatttccttattctgtaacataagatgcattgattttatagcatagtgtttaaatattgttaatttttttaactggctccagtgttcaaccttgattaattttacatcatagtatttaagttatgggatatcaaggagagagtaaacatcacatgaagactttaccacctcttctgggaaacgggttaaagtgtttctggtggaatgctggattgttaatcgtgttagatggaattatgaccttgttgttgtctttatgtggcagttaagtatggtttaaagagatgtttatgggtgccaagttgacaagggtaaacttgtgatggttaattttatatgtcaacttgaataggccacagggtgccaaatatctgtttaaacattattctgaagtgtcttgagtgtgtttacagacaagatttgcatttgaactgggggactcagtaaaggagatagccatccccaaggtgggtggacatcatccagtttgttgagggcgtaaataaaataaaaggcagaggaaggaagaattccccccccttttttttcctgcctcattgtttgagctgtgacatctcatcttctgtcctcagatggatttacatcactggcttccctggttctcaagcctttggattcagactgaattataccacaggccttcctgggtctccagcttatagatgacagatcatgggacctcttagcctccataatcatgtaagccactttcttgtagtactggtaaaagatatattaaaccaatctataaaacagatagctatgaaagagaaaggtgacaggcacaagcctaggcaaatagagaagggttcctggacagcctctgacttgcctaggtcattgtgcacacgtggcttgcctgaatgaacatgcccactgtgaaagattccatttctcaacacatgtgcagtaagggaaataaatcaatgtggctcaaactaaccgcccacacatggggtggagccacaaggagtttgctccttatgcaggggagaagccgtgcctcttcagctcgtgtgtggtggcctggcattcaatttgtgaggtgtaaaacctgcatgaaggacccctctttttgtggagagctttccttttgcctaataaattctgccctcctcgccaaaaaaaaaaaaaaaaaa

SEQ ID NO: 6840 - DNA, 3258 bp, Homo Sapiens
  NM_182755
agggcggagcctgggggcccagcggcccgcgccccgtggcttgacctccccgactgctgggcccgtgacgtcaccccgctgtgacgcgcacgctgtaggaaaactaattaattaaaaggatttacggtatatcttatgactctacaggagccttgggatatagataaaaatgaatgccatttcccatccagtactgaagtgttaaagttagaagacatttgctaagtcaaatcacttcaggaagctcatcctgggagtggaggaacagatgttctgtcattgccacattcttctggacacagactggagaactataggaatgtatgttgaagaaagtacgcacatcttatcttctgaacattttgatggaattaaccacaaacttcatgcaagaacagtaaaaggaaagatactattcaagtccagtacatcataatgcagaattctgtatcagtaccaccaaaagatgaaggtgaatcaaacatcccttctggaacaatacagagtaggaaaggtttgcagaataagagtcagtttaggaccattgcaccaaaaattgtgcccaaagtcctaacgtccagaatgctgccatgtcattcaccatcacgctctgatcaggtgaatctgggaccctccatcaactccaagctgctggggatgtccacccagaactatgccctgatgcaggttgctggccaggaggggacattttctcttgttgctctgccacatgttgcctcagctcagccaattcagaaacccagaatgtccctacctgaaaacctgaaacttcctattcctagatatcaaccccctagaaatagcaaagcatcaagaaagaaacccatcctgatctttcctaagagtggctgtagcaaagctcctgcccaaacccaaatgtgtcctcagatgtccccttccccacctcaccaccctgaactcctgtacaaacccagtccatttgaggaagtaccatcactagagcaagccccagccagcattagcacagctgcgctgaccaatggaagtgaccatggggacttgagaccaccagtgaccaacacccatggcagtctgaaccctcctgctaccccagcatcatccacaccagaggagcctgccaagcaggacctcacagctctttcagggaaagcacactttgtaagcaagataacatctagtaaaccttctgctgttgccagtgaaaaatttaaagaacaagttgatcttgcaaaaaccatgaccaatttatcaccaaccattcttggcaatgcagttcagttgatctcttcagtccccaaagggaaactgccaatcccaccctactcaagaatgaagacaatggaggtttacaaaatcaaatcagatgctaacattgcaggtttttctttaccaggacctaaggccgactgtgataagataccctccaccacagaaggctttaatgcagccaccaaggtggcaagcaggctacctgttccacaagtgtcacagcagagtgcctgtgaaagtgccttttgtccacccaccaaacttgatcttaaccacaaaacaaaactgaacagtggagcagcaaagagaaaaggaagaaaacggaaggtaccagatgaaattttggcatttcagggaaaaaggaggaaatatatcattaataagtgtagagatggtaaagaaagagtaaaaaatgatccccaagaattcagagaccaaaagctggggaccctgaaaaaataccgtagcattatgcccaaacctatcatggtcatacccactttggcctccctggcttctccaactacactacagtcccagatgcttgggggcctaggacaggatgttttgttaaataattcactcactcctaaatatcttggctgtaagcaagacaacagctcttcccctaagcccagctccgtgttcagaaatggattctctggcattaagaagccttggcacagatgtcacgtctgcaaccaccacttccagttcaaacagcaccttcgagaccacatgaatacacacaccaacagacgcccttacagttgtcggatttgtcgcaagtcctatgtacgtcctggcagcctgagcacacacatgaaacttcatcatggtgagaaccgtctgaagaaactcatgtgttgtgagttttgtgcaaaagtgtttggccacatccgagtctattttggccatctgaaagaagtgcatagggttgtgatcagcactgagcctgcgcccagtgaactgcagccaggagacataccaaagaacagagacatgagtgtgcgaggcatggagggatcattggagagggaaaacaagtccaacctggaagaagacttccttctaaaccaggcagacgaagtcaaattacaaatcaaatgtggtcgttgtcagattactgctcagtcttttgcggaaataaaatttcatttacttgatgttcatggagaggaaattgagggcaggctacaagaagggaccttcccaggaagcaaggggactcaggaagagttggtgcagcacgctagccccgactggaaaaggcatcctgagagagggaagccggagaaggttcattcctcctccgaggaatcacatgcatgtccaagactgaaaaggcagctccaccttcatcagaatggcgtggaaatgctcatggaaaatgaaggaccccagtcaggaaccaacaagccaagggaaacctgccagggccctgagtgtcctggcctccacacgtttctcttgtggtcccattcaggctttaactgcctgctttgtgcagagatgctgggacggaaagaggacctcctccaccactggaagcaccagcataactgtgaggacccttccaaactgtgggctattttaaatacggtctccaaccagggagtgatcgaactttccagtgaagctgagaaatgagaccccaaggcagcctggggttaaggagagagctctgccgccaccttccttcagagcttcgtgctttatggtggtgcttagtcacaaagatcaaacaacaggattggtgtgagtgaacagaaatgatttttgtacatggttttattttcttaacgaaataaaatataagctctcgaagcatatttttctaactatatgcagtcttattttaaaatacgtactgattcttaatatcttagactttcagaataaataaaaagatcaaaatttgaagattgaaatttagcagaatataggctgttcttcaaatacagctctcagtgaaaaaaaaaaaaa

SEQ ID NO: 6841 - DNA, 5036 bp, Homo Sapiens
  NM_182757
gagctgtgccccacgctcccgctgcaacagtcccgggcatcgcagctgccagtcaaggctaggaggcggtcggggactccgcctcctcccgacccgtaggtctgggagcgcaagtcctgttgcagtcttgcaaagtgtaaagctgtcagccgcagagcacggaggaaagacggagagaatggaagagctcctgtccggtgtgccagcagcccggactggcggtgagcgcgagggaggctactgagaagcccggcgacggaggaacgcaggtctgctgccagggattgaggagactgaagaatgctgaagacaggctgatgggctcagctggtaggctccactatctcgccatgactgctgaaaatcccactcctggagacctggctccggcccccctcatcacttgcaaactctgcctgtgtgagcagtctctggacaagatgaccacactccaggaatgccagtgcatcttttgcacagcttgcctgaaacagtacatgcagctggcaatccgagaaggatgtgggtctcccatcacttgccctgacatggtgtgcctaaaccacgggaccctgcaggaagctgagattgcctgtttggtacctgtggaccagtttcaactttatcagaggttaaaatttgaaagagaagttcatctggacccctaccgaacatggtgtcctgttgcagactgtcagacagtgtgccctgttgcctcgagtgacccaggacagcctgtgctggtggaatgcccttcttgccacctgaaattctgctcgtgttgcaaggatgcttggcatgcagaggtctcctgtagagacagtcagcctattgtcctgccaacagagcaccgagccctctttgggacagatgcagaagcccccattaagcagtgcccagtttgccgggtttatatcgaacgcaatgaaggctgcgctcagatgatgtgcaaaaactgcaagcatacattttgctggtactgcctccagaacttggataatgacattttcctcagacattatgacaaagggccatgcaggaataaacttggccactcaagagcatcagtgatgtggaaccgaacacaggtggtggggattctcgtaggcttgggcatcattgccttggttacttcacccttgttactcctggcctccccatgtataatctgttgtgtctgcaagtcctgtcggggcaagaagaaaaagcacgacccatccacaacctaaagatctctgtgttcatacgccccagatatgtgagttacatgagatggcacagtgataaagccccatttagtgaccttgcctccttctccttgccaactttgaaagtgcctccgtgtccagactttgaacttgcctgccagccttcagcatcaggaaaggccaagtcctgggtgtgagtgttcctgtgtaacaagaactgggctcaacggtccagctgtttctatggagctttggggttccttgagatgaatgaacatatcattttatcatccaaaggatctcactggactgttcaacttccagccaaattcaaggagcttgcgggaacatttgatataacaaatgtgttgtcattgttggcaacatacaagataaccaagaagctggagtctgttctgtgttgatttgactgccatgagaaacacaggggaaacctgatgaggagaaggataagactgcgtaaggagaaatcctcataggagctataaagcaggctgctgatctcagcagttgatatggtggttgtgcctctgctggctactgggtgtgctgtccccatgttcccgctgtgatttggcagaaacacaataggcttctccttgtgtgatctcagcttcaagcaggtgaaactgctgtgcagagggagttgccccttcccagtaaaagagttgcagcctgttaaacaatgtggtctaatttagtgtctctcccttggcaaatgtaagttttctaagttggccaacttgtctcttacagccagtggctgtggtctacagaattgtttcatataaaatacgggtagagtggtagagtttcaaaactttcgtcatagatatctgggacctttctcaggatctgtgttcacacagccaatagatttggaatcaggcctaagagtacacatggagggtaaatattaaagtgcgtattatgtacatctagaatccatgtgacttgcagcctacctgtaatttctatccattgagcatgcatggatatacccaatagtacacacaaaataaatgtttacttaagagccattctatccttttgtgactgaaatggtttattgtaaatctgcctaaagattttttgcatattatatatgtgaattttggttgtaagttcataacttacccaagggtatagactcataactcttttaaaacagtgcttagtacaatatcctgccatctctgtaaaaacgctaattgataaccgagtcatttacatgttttcgaacacagaatagctcttttctcagcatcattattgctctttcagcatctgttaggacagtctgaatactttctgtttcaaggcactgataaaaccgcaacaaaaacatgtaagaaataaaatagaaatgctttatataatttagtttaaatttatgtatcacctcattgtgacttattttttccattataccattagtcagatttgaataacgaggttttgaaaggataaaaccttttctccaatgacaggattatataattgctattggcaatgtagcctggtgcttcatgagacctatgctaaatgttactggagagttcttgaagccagggataccatatcaggaactattcaggatctatgatattttctgaggtaactgggtaatagaatatcaaattgctgctatctcggacctattgttaaaggatgatgctttgcctatgtaataggatatatcctaagtggggatgtgtatatttcaggaactttaattcacaagtatatattgatatctgatgtgtgtatagtacatctgttggttatgtacattttaatttacatgttgtgtagaacatagatgagaactctgggaaaacttgggaatggcaaccaaccaaaatcatttttaatcatttattagaaatttctcaatattgtgtctttttcttttgaaactctaaacacttcagaaaaaaacactatcagtgtagttcatgttagtataattatagatttacatatatttgaatagttaatttgctttgttttacacgtagcccactgcctcattataggtaaaaggcatttataactgctcaggggattacgagaactcaactgaaactgaatttttgtaacaagaatgttaatagtggcaaagtcctctgtcagtaaactctttaagcttggtgctgcaaagagtctttaaatgggggctgatttcaagtaacctaaaagactgtgttatcagaggaagaggtcccaaatttggagtaaagatgggagaaaataaatatgtgctatttccttggcgagttgagggaatttgccaccttacagagtttgtatcactgaattagctgcttttgtttttttttttttttttttgccagggctatggagtgggggttgtttgtcaaactgattttcaataattggatttaattttttttaacattgaaaagtgcctgaaaaatggtaaattcttaaatgtgtgtgagattgtcagaatcaacaaaactaggttggttaaacatatctctggtacatcaaggggcatgatacaaaccagtctaaagactgtttataaaggagagagctggcgacttatttttatttttattttttggacagagtctccctttgtcacccaggccggagtgcagtggcatgatcatggttcacttcaacccctacctcctgggctcaagtgttcctctcaccttatcctcctgagcagctgggactacaggcacacaccaccacacctggctaagttttgtattttttgtagagatggggtttctctgtgttgcccagtcttgtctcaaactcctgggctcaagcgatccacccaccttgggctcccaaagtgttgggattacaggtgtgtgtcactgtgcctgacagctgacagttttaactgacaactttgataacagaggctgctatttttgttttagataattggccagtgacagagtttacccttgcctcctttcttggtctgccagctttgtcctttctgagtgattctctttctgtattgagaggaagtgtgggtctacatagggatgtttggatgctatggcaagaatctttttgtgtttggagtgtagtccatttgcaatagaaataaaaaaatccgtcaccaaattgtaacctggatgttatagcccagcatctagaaatcctatgaaacgtattagcacaatatcttgccattgtcccatctaggaaattttttcttgttgtgaggtagggaagtgaggaggaaagccatgccgaagcaaatgttagaatcttaggcatcctatttgttcatgccatgggtatttgctttggacttggagtctgtactttgaaagaggcctttgaaaaacaaataattctgtgtgaattttcttgtagcgtgcttcatgaaaatatctacttatccaggtttgcaaatgtacatgttcatttgaatgtaaatcaccatttcttggaaccccacgttttttcttaaaaattattctgaattaaatgtatatttctttagccttccctacacagtactaataaaagacttttctttctgttcatgaatggatgcctttatgtgatatagagtcatgtgtgtatgtgtagctttaagggcaatttcagaaatgcattagatgaatgacattttataaagcgatcacaattgatatctacaggctattatgtctcatgttgattcatgatccaggaagttttatgtatttaaaaaattgctatcgtgttatatttttccaatttttggagaagaaaatagctgtttaggctctctagccacaataaatgtaagcaggaaatcaa

SEQ ID NO: 6842 - DNA, 2900 bp, Homo Sapiens
  NM_182776
agtgtcgtgtaaacagtgtccttccgcgcggcggccgcggagagagctgcggcccgggggggcgtgcctgggatccggagcttcgctcgggcccgggaaaggcggcagtgggctgggatcgcggtgtctctgggtgtgatggccaatggctggactggctcccgccctgggcggaggaatcccgagctgtgaagcggctggaatccgggcccatgtgcttctttgtttactaagagcggaagcgatggcgggagcgggggtggggtgcggtggcggggtgcggtggcggaggtcccggtgaaatcaggggctaaggggacccaaagaaggcgggggatcataggggtggaaagaaagctgagaaccttgagaccggagtgtgaggggccaacggggaagggcgctagaattttaaactaaagtagggaccggaattcccctggggagatgttggatggccctgtgcactgccacgggctctttattcttcgctggttagaaacagacttgtgaaaaagagttatgcccactttggggagacttcgaaaaggttaagaagttcttacaagagttctaccaggatgatgaactcgggaagaagcagttcaagtatgggaaccagttggttcggctggctcatcgggaacaggtggctctgtatgtggacctggacgacgtagccgaggatgaccccgagttggtggactcaatttgtgagaatgccaggcgctacgcgaagctctttgctgatgccgtacaagagctgctgcctcagtacaaggagagggaagtggtaaataaagatgtcctggacgtttacattgagcatcggctaatgatggagcagcggagtcgggaccctgggatggtccgaagcccccagaaccagtaccctgctgaactcatgcgcagattgtgagtggtctctgtcgggaaagatgtagggattggttctccaggatcttgtttgtgactgttttctccccttagtgagctgtattttcaaggccctagcagcaacaagcctcgtgtgatccgggaagtgcgggctgactctgtggggaagttggtaactgtgcgtggaatcgtcactcgtgtctctgaagtcaaacccaagatggtggtggccacttacacttgtgaccagtgtggggcagagacctaccagccgatccagtctcccactttcatgcctctgatcatgtgcccaagccaggagtgccaaaccaaccgctcaggagggcggctgtatctgcagacacggggctccagattcatcaaattccaggagatgaagatgcaagaacatagtgatcaggtgcctgtgggaaatatccctcgtagtatcacggtgctggtagaaggagagaacacaaggattgcccagcctggagaccacgtcagcgtcactggtattttcttgccaatcctgcgcactgggttccgacaggtggtacagggtttactctcagaaacctacctggaagcccatcggattgtgaagatgaacaagagtgaggatgatgagtctggggctggagagctcaccagggaggagctgaggcaaattgcagaggaggatttctacgaaaagctggcagcttcaatcgccccagaaatatacgggcatgaagatgtgaagaaggcactgctgctcctgctagtcgggggtgtggaccagtctcctcgaggcatgaaaatccggggcaacatcaacatctgtctgatgggggatcctggtgtggccaagtctcagctcctgtcatacattgatcgactggcgcctcgcagccagtacacaacaggccggggctcctcaggagtggggcttacggcagctgtgctgagagactccgtgagtggagaactgaccttagagggtggggccctggtgctggctgaccagggtgtgtgctgcattgatgagttcgacaagatggctgaggccgaccgcacagccatccacgaggtcatggagcagcagaccatctccattgccaaggccggcattctcaccacactcaatgcccgctgctccatcctggctgccgccaaccctgcctacgggcgctacaaccctcgccgcagcctggagcagaacatacagctacctgctgcactgctctcccggtttgacctcctctggctgattcaggaccggcccgaccgagacaatgacctacggttggcccagcacatcacctatgtgcaccagcacagccggcagcccccctcccagtttgaacctctggacatgaagctcatgaggcgttacatagccatgtgccgcgagaagcagcccatggtgccagagtctctggctgactacatcacagcagcatacgtggagatgaggcgagaggcttgggctagtaaggatgccacctatacttctgcccggaccctgctggctatcctgcgcctttccactgctctggcacgtctgagaatggtggatgtggtggagaaagaagatgtgaatgaagccatcaggctaatggagatgtcaaaggactctcttctaggagacaaggggcagacagctaggactcagagaccagcagatgtgatatttgccaccgtccgtgaactggtctcagggggccgaagtgtccggttctctgaggcagagcagcgctgtgtatctcgtggcttcacacccgcccagttccaggcggctctggatgaatatgaggagctcaatgtctggcaggtcaatgcttcccggacacggatcacttttgtctgattccagcctgcttgcaaccctggggtcctcttgttccctgctggcctgccccttgggaaggggcagtgatgcctttgaggggaaggaggagcccctctttctcccatgctgcacttactccttttgctaataaaagtgtttgtagattgtc

SEQ ID NO: 6843 - DNA, 3328 bp, Homo Sapiens
  NM_182799
gagacggctgcagaccatggggcagggagcatatggagcacggatatgccagacagagggatgattcatatcccaggcaggatggagcagggcagtgtgctatttcatcgtgctactcagaacttatgaattgtttatttctggaatttcccatttaatatttttggactgtggttgatcgagggtaaatgaaattgcagaaagcaaaaatacagataagggggactgcttgctgtacaaagatagagacaagaggaaggagctgtcctcaagggccttttgtgtgaagacatctggcacacagatacgctgcatgcaggtggcttgagagaacatgcatccaggtttaattgtggaactggggttgccatcatcgtaagtgagaccaaaatcaaactagggggttggcacacggttatgctctacagagatgggctgaacgggctgctgcagctgaacaatggcaccccagtgacaggccagtctcaggggaatgcagcagtggaatctgtgatgaggcctcgtgcatccatggtggcacctgcacagcaatcaaagccgactcctacatttgcctctgtccccttgggtttaaaggtcgacactgtgaagatgctttcaccttgaccattcctcagttcagagagtctctgagatcttacgctgcaactccctggccactggagccccagcattacctttccttcatggaatttgagatcacatttcggccagactcaggagatggtgtcctcctgtacagctatgacacaggcagcaaagacttcctgtccatcaacttggcagggggccacgtggagttccgctttgactgtggctctgggaccggtgtcctcaggagtgaagatcccctcaccctgggcaactggcacgagcttcgtgtatctcgcacagcaaagaatggaatcttacaggtggataagcagaagatagtggagggaatggcagagggaggcttcacacagattaagtgcaacacagacattttcattggcggagtccccaattatgatgatgtgaagaagaactcgggtgtcctgaagcctttcagcgggagcatccagaagatcatcctgaatgaccgaaccatccatgtgaagcatgacttcacctccggagtgaatgtggagaatgcggcccacccctgtgtgagagccccttgtgcccatgggggcagctgccggcccaggaaggagggctatgactgtgactgccccttgggctttgaggggcttcactgccagaaagcgatcatagaagccattgagatcccgcagtttatcggccgcagttacctgacgtatgacaacccagatatcttgaagagggtgtcaggatcaagatcaaatgtgttcatgaggtttaaaacaactgccaaggatggccttttgctgtggaggggagacagccccatgagacccaacagcgacttcatttccttgggccttcgggatggagccctcgtgttcagctataacctgggcagtggtgtggcatccatcatggtgaatggctccttcaacgatggtcggtggcaccgagttaaggccgttagggatggccagtcaggaaagataaccgtggatgactatggagccagaacaggcaaatccccaggcatgatgcggcagcttaacatcaatggagctctgtatgtgggtggaatgaaggaaattgctctgcacactaacaggcaatatatgagagggctcgtgggctgtatctctcacttcaccctgtccaccgattaccacatttccctcgtggaagatgccgtggatgggaaaaacatcaacacttgtggagccaagtaacaccagctggccttgtccaagggacagagccttctattctgagaatcccaggggccctcagaccctgcctgatgctatatgcagaggcccagggaccaggtgtgtttcctctcaccaagaagaaagtacacactgatgagaaactgagaaccaagacaggcatccctgggtggcctttcctgctgacactccacgagctgacccagcagaattctctgtgtaggaagcatcggactttgtccattgaatatgtagcggctgccagagatcacacatcaatgcaaattccagagcctgtctgctatagctcagtgactgtgttgtgattcatagtacattaaaaagagagagagagagaaagaatcccacagggcactattaaaatacttctctccttccctgactcatgacactcttcctgacagcagaatgactgtgtgaccttgaacttcacatttcccacattggcccttggattgttcggattaaccccttccactcctcactggctggttcactgtgttctgactagtccataaaaataaagatggaaggagatcaaacacagaatcataatcataatgcggcccccttccccagagcttacctcgaatgtgaaatccctacttcttataatgcagagttaaggagctgagcccccatgattttgtagctgtacttttgtatgtgtatatttttatagctgcagattgtccacacagtatacttttggaagtttgggtggatgactctgaattcttgcacacctttcctaaaaatttctcccaagagagacttgtttgggccttttgtggtgtcagtggaatggataggtaacttgggtgggcaacttggggagctgaccattctcttttggtaaatgttgacggctcaagaggatgaatatgaagctttccaagataagcagattaaaaggaacatgtgttaccgaggtaggtcactgtcatttttgttttaagagttggggggagtatctatagtaaacttgaataaaggggacaaagctagaacttattcattcattcattcacttatggagttgttactgattttgcggaggtcaggttcataccaatggacactaatacaatcagtgttcccaaggctgtgcaggggtggggggacatgctgtcaggatggtctgagcatctgggtgagaaccagagaaacaggacttcttccttctgtaccatgagctgtgtccctttactatgcaagcacatgaccccagagacagctggttcactggcagatccccatgatggacttactaagggaaaggtgagatgaacactgcccccaaggagggggtgaaatatgatctaacttatgcaagagcctataattagtcccagtctcgactctacatttgtttgtgcagcattcattcagcaaagacttttggggtttgtgcaaggcacagttttaagcacataatgtaattctaaaagatgaataaactagagaggttc

SEQ ID NO: 6844 - DNA, 5202 bp, Homo Sapiens
  NM_182811
gagccgccgccgggtcccgctcgtctgccgcctcagcctcagccccaacctcagccgccgccgttgcgcttgctcccgggcggtcctggcctgtgccgccgccgcccccagcgtcggagccatggcgggcgccgcgtccccttgcgccaacggctgcgggcccggcgcgccctcggacgccgaggtgctgcacctctgccgcagcctcgaggtgggcaccgtcatgactttgttctactccaagaagtcgcagcgacccgagcggaagaccttccaggtcaagctggagacgcgccagatcacgtggagccggggcgccgacaagatcgagggggccattgacattcgtgaaattaaggagatccgcccagggaagacctcacgggactttgatcgctatcaagaggacccagctttccggccggaccagtcacattgctttgtcattctctatggaatggaatttcgcctgaaaacgctgagcctgcaagccacatctgaggatgaagtgaacatgtggatcaagggcttaacttggctgatggaggatacattgcaggcacccacacccctgcagattgagaggtggctccggaagcagttttactcagtggatcggaatcgtgaggatcgtatatcagccaaggacctgaagaacatgctgtcccaggtcaactaccgggtccccaacatgcgcttcctccgagagcggctgacggacctggagcagcgcagcggggacatcacctacgggcagtttgctcagctgtaccgcagcctcatgtacagcgcccagaagacgatggacctccccttcttggaagccagtactctgagggctggggagcggccggagctttgccgagtgtcccttcctgagttccagcagttccttcttgactaccagggggagctgtgggctgttgatcgcctccaggtgcaggagttcatgctcagcttcctccgagaccccttacgagagatcgaggagccatacttcttcctggatgagtttgtcaccttcctgttctccaaagagaacagtgtgtggaactcgcagctggatgcagtatgcccggacaccatgaacaaccctctttcccactactggatctcctcctcgcacaacacgtacctgaccggggaccagttctccagtgagtcctccttggaagcctatgctcgctgcctgcggatgggctgtcgctgcattgagttggactgctgggacggcccggatgggatgccagttatttaccatgggcacacccttaccaccaagatcaagttctcagatgtcctgcacaccatcaaggagcatgcctttgtggcctcagagtacccagtcatcctgtccattgaggaccactgcagcattgcccagcagagaaacatggcccaatacttcaagaaggtgctgggggacacactcctcaccaagcccgtggagatctctgccgacgggctcccctcacccaaccagcttaagaggaagatcctcatcaagcacaagaagctggctgagggcagtgcctacgaggaggtgcctacatccatgatgtactctgagaacgacatcagcaactctatcaagaatggcatcctctacctggaggaccctgtgaaccacgaatggtatccccactactttgttctgaccagcagcaagatctactactctgaggagaccagcagtgaccagggcaacgaggatgaggaggagcccaaggaggtcagcagcagcacagagctgcactccaatgagaagtggttccatgggaagctaggggcagggcgtgacgggcgtcacatcgctgagcgcctgcttactgagtactgcatcgagaccggagcccctgacggctccttcctcgtgcgagagagtgagaccttcgtgggcgactacacgctctctttctggcggaacgggaaagtccagcactgccgtatccactcccggcaagatgctgggacccccaagttcttcttgacagacaacctcgtctttgactccctctatgacctcatcacgcactaccagcaggtgcccctgcgctgtaatgagtttgagatgcgactttcagagcctgtcccacagaccaacgcccacgagagcaaagagtggtaccacgcgagcctgaccagagcacaggctgagcacatgctaatgcgcgtccctcgtgatggggccttcctggtgcggaagcggaatgaacccaactcatatgccatctctttccgggctgagggcaagatcaagcattgccgtgtccagcaagagggccagacagtgatgctagggaactcggagttcgacagccttgttgacctcatcagctactatgagaaacacccgctataccgcaagatgaagctgcgctatcccatcaacgaggaggcactggagaagattggcacagctgagcctgactacggggccctgtatgagggacgcaaccctggcttctatgtagaggcaaaccctatgccaactttcaagtgtgcagtcaaagccctctttgactacaaggcccagagggaggacgagctgaccttcatcaagagcgccatcatccagaatgtggagaagcaagagggaggctggtggcgaggggactacggagggaagaagcagctgtggttcccatcaaactacgtggaagagatggtcaaccccgtggccctggagccggagagggagcacttggacgagaacagccccctaggggacttgctgcggggggtcttggatgtgccggcttgtcagattgccatccgtcctgagggcaagaacaaccggctcttcgtcttctccatcagcatggcgtcggtggcccactggtccctggatgttgctgccgactcacaggaggagctgcaggactgggtgaaaaagatccgtgaagtggcccagacagcagacgccaggctcactgaagggaagataatggaacggaggaagaagattgccctggagctctctgaacttgtcgtctactgccggcctgttccctttgatgaagagaagattggcacagaacgtgcttgctaccgggacatgtcatccttcccggaaaccaaggctgagaaatacgtgaacaaggccaaaggcaagaagttccttcagtacaatcgactgcagctctcccgcatctaccccaagggccagcgactggattcctccaactacgatcctttgcccatgtggatctgtggcagtcagcttgtggccctcaacttccagacccctgacaagcctatgcagatgaaccaggccctcttcatgacgggcaggcactgtggctacgtgctgcagccaagcaccatgcgggatgaggccttcgacccctttgacaagagcagcctccgcgggctggagccatgtgccatctctattgaggtgctgggggcccgacatctgccaaagaatggccgaggcattgtgtgtccttttgtggagattgaggtggctggagctgagtatgacagcaccaagcagaagacagagtttgtggtggacaatggactcaaccctgtatggccagccaagcccttccacttccagatcagtaaccctgaatttgcctttctgcgcttcgtggtgtatgaggaagacatgtttagtgaccagaatttcctggctcaggctactttcccagtaaaaggcctgaagacaggatacagagcagtgcctttgaagaacaactacagtgaggacctggagttggcctccctgctgatcaagattgacattttccctgccaaggagaatggtgacctcagtcccttcagtggtacgtccctgcgggagcggggctcagatgcctcaggccagctgtttcatggccgagcccgggaaggctcctttgaatcccgctaccagcagccgtttgaggacttccgcatctcccaggagcatctcgcagaccattttgacagtcgagaacgaagggccccaagaaggactcgggtcaatggagacaaccgcctctagttgtaccccagcctcgttggagagcagcaggtgctgtgcgccttgtagaatgccgcgaactgggttctttggaagcagccccctgtggcggccttccgggtctcgcagcctgaagcctggattccagcagtgaatgctagacagaaaccaagccattaatgagatgttattactgttttgggcctccatgccccagctctggatgaaggcaaaaactgtactgtgtttcgcattaagcacacacatctggccctgacttctggagatggatccttccatcttgtggggccaggaccatggccgaagccccttggagagagaggctgcctcagccagtggcacaggagactccaaggagctactgacattcctaagagtggaggaggaggaggagccttgctgggccagggaaacaaagtttacattgtcctgtagctttaaaaccacagctgggcagggtgagaagctagatgcccctgcagtttggccctggagccagggcagaggaatgtagggcctgcatggagaagggttctgccctgcctgaggaggaggacacagcacaagggcacattgcccatggctgggaacatgacccagcctgaaagatacaggggatcatgttaaaaatagcagtattatttttcgtctcaatggtattgtaactaagttatttactcctcctgctcctcacccctgtagggaaaccttggagaggagagtggcaggtgggctgcctgctgtgttaagaggacttagtttgtgatgtaaggcactgtcaggaatggggggcgggccagggtgggaagagaagaaatagcagagcctattttggtgaggttttttgtttttaagtcaaagaagactcagtatgctttccctgaggaatgaaaaagggattgaggagttgcctgactcctgggtgggtggggtacaggcagttaggtgctgaatgaagctgccatccttgctgcagcttctaactggtaaaaagatccagggatggagatgggaaggttagaaaggcagccctcacctctgaggacagaggccggggtccaggcccgtgggcgcaaaggtgcctcatagcatagccagcattcagcacacacaaacctactgcccacatttgggctcagggttggccatttgctagttctgctgccctcttaagatctgactgccaaataaatcatcctcatgtcctt

SEQ ID NO: 6845 - DNA, 2508 bp, Homo Sapiens
  NM_182827
gtgagccggagagggtgaagcaggcaggaagctgcaggccggcggtggatggggccaggaagcatgcagggggagtgaggaccgtgtatgagagaaacactgcccaagagagaagaaagaaaatcacaggacccgaggaaaaagaatgagtggtgtgttcagagatgacacatgacaacaaattgtttgcttggaggattttcttacgcgtgcgtgtttaaactggcctcaaggaggaagaagaaacatgcgttcctggatgactgagttctggaatattctgtcataagactttgcaactggagtagccccagaaaaaggcaggcagtgggagttggctccctccccaaagccatccctgagttggctttgttttgggttcctcccaggtggaatttaggcaaaacttacagtattgttctgggatctgggcaagttgtgttggggatggacatgggtctcagagagatgtgcgttggcgagaaacggacagtgatcattccgcctcacctgggctatggggaagctggcgtggatggagaagtgcccggcagtgccgtattagtgtttgacattgagctgctggagctggtggctggccttcccgaggggtacatgttcatatggaatggtgaggtgtcacccaacctttttgaagaaattgacaaggatggcaacggagaagtcctcctggaagagttctcagagtacattcacgcccaggtggcatctggcaaagggaaactcgctcctggctttgatgctgagctgattgtgaagaatatgttcaccaaccaggaccggaatggagatgggaaggtcacagctgaggaatttaaactcaaagaccaggaagccaaacaggatgaactctaaacctggcacgaaccagatggtgccagggagtacgtgacaccaagccaactgtgtggcagaacgtgcagtgagggtgcaagggtctttcagaagttgcatcattagccagtagtaggtgggtcacatagtacctggtgtacacatcggggtgggttgatatatggggtgagaagtttaggctgatcgccagtgatagtaaacaaaatctgtgcagagggccttagcatgggatgtgtccagtattgaaaaggctgcactgccaaccatgatttgtgaaccttctgggaaattttgttattaaaagaatatatagtgtcagacggaagttataatcatcttggaggaaccataagaaaaagtgtccagggtatctatataaagagggttaaatttttttttaacttgctggttaaaacattttagaaatattcttgagatgggcaggagagtcaaagggcttgcttgccccagcagagttcccagcagacagccatggctcttcccagcagcctgtgcaaattctgatgatgaccccacccccgcacacgcacacgcacatcatgcttttccagctcatcacaccccgccccactatgggcctaccattaatagtgtatatcttggaggttaaaagagccttttggacagaaaactgggccaggaaaaggcatctcagaccacaaatagagaatttgattcctcatttgccacataagtcatctgcttagcttttcctttctttttttttttttttttttttttggaggcagagtctccgtttgtcgccaggctggagtgcagtggtgccatctcggctcactgcagcactgtctcggctcactgcagcctccgcctcccgtattcaagcgattctcctgtctcagcctcctgagtagctaggactacaggtgtgcaccaccacgccccgctaatttttgtatttttggtagagacggggtttcaccgtgttggccaggatggtctcaatctcgacctcgtgatccgcccacctcggcctcccaaagtgttgggattacaggcatgaatcaccatgcctagccacttagttttttgtcattcccacctttctatcccatagaacactcttttttatcttccctgaaccatattgatgagataaatagggctgggggctgggccccgctggtcactcaacagagtatttcccttggccgagatggaagttttgtcccaatagatgagctgctgagcatcaacaaggtgacatttttctgctgcccatttgtgtcctggagacggtggtaccctgaaggcagaggccagctgctgcaagacagcaatgacagtccacctgccggcctgattcctgcatcatggaataaccacatggctaccttctatcctctgttcccaaatggtggtggcacttatcctgaagtcatcaatgatttccctttgaaactactttattttactaatttaaactattttgtactgatgtagccctgaggtagttcatgaaaatgctgtgcactcattccatggaataaatgttggaaagctgatcttttctgatataaaatgttgaattataaaaaaaaaaaaaaaaaaaaaaaaaaaaaaaaaaaaaaaaaaaaaaaaaaaaaaaaa

SEQ ID NO: 6846 - DNA, 1307 bp, Homo Sapiens
  NM_182849
cttcctgtctctccactttctttccctctccgttttggtgggctgaaatgatcctagataattgatagatcctgtggttcaactggatttctagatagaagctggattcatgtgatgccagaggagtaaaatttcaagagactgaaaccagatctgagtttcgctgttccagtctggacctctttggtgctgtaaatcctggatatactgtagatgagtactgcgtttttcttttatggcctctcttcagcttctggagacctcactatcctattatgtctttgtgtgaagacatgctgctttgtaattatcgaaagtgtcgcatcaaactctctggctatgcatgggtcactgcctgctctcacatcttctgtgatcagcatggcagtggtgagtttagtcgctcaccagctatctgtcctgcctgcaacagtaccctttctggaaagctagatattgtccgcacagaactcagtccatcagaggaatataaagctatggtattggcaggactgcgaccagagatcgtgttggacattagctcccgagcgctggccttctggacatatcaggtacatcaggaacgtctctatcaagaatacaatttcagcaaggctgagggccatctgaaacagatggagaagatatatactcagcaaatacaaagcaaggatgtagaattgacctctatgaaaggggaggttacctccatgaagaaagtactagaagaatacaagaaaaagttcagtgacatctctgagaaacttatggagcgcaatcgtcagtatcaaaagctccaaggcctctatgatagccttaggctacgaaacatcactattgctaaccatgaaggcacccttgaaccatccatgattgcacagtctggtgttcttggcttcccattaggtaacaactccaagtttcctttggataatacacctgttcgaaatcggggcgatggagatggagattttcagttcagaccattttttgcgggttctcccacagcacctgaacccagcaacagcttttttagttttgtctctccaagtcgtgaattagagcagcagcaagtttctagcagggccttcaaagtaaaaagaatttgagccacgcatagtgtcacgcacctgtgatcccagctacttaggaggttgaggctgggaggatcacttgagcccaggagtctgaggctttagtgatctaagatcatgccactgcactccagcctgggcaacagagtgagaccctgtttctaaaaaaaaataaagataatttagctaactttaaaaaaaaaaaaaaaaaaa

SEQ ID NO: 6847 - DNA, 1681 bp, Homo Sapiens
  NM_182851
tcaggttgaagatgaaatccactgaggagggaagtccagcaccctgtgtgccagtccagaactggcccatctgtagaccccctgaaaatcatatgggcttggatttggatattctcaacagaaagggttaaaggctgatggtacctaaagcctggtacttgaattttgatcaagataagctgccttaagttctcttcattacacaaatgatcctagataattgatagatcctgtggttcaactggatttctagatagaagctggattcatgtgatgccagaggagtaaaatttcaagagactgaaaccagatctgagtttcgctgttccagtctggacctctttggtgctgtaaatcctggatatactgtagatgagtactgcgtttttcttttatgacggagggtcgctcttgttgccgtggctggagtgcaatggtgcgatctcggctcactgcaacctttgcctcgtgggttcaagtgattctcctgcctcagcctcccgagtagctgggattgcaggcgtccaccaccacgcccagctaatttttgtattttagtagagagagggtttcaccgtgttggccacgctggtcgggaactcctgacctcaggcctctcttcagcttctggagacctcactatcctattatgtctttgtgtgaagacatgctgctttgtaattatcgaaagtgtcgcatcaaactctctggctatgcatgggtcactgcctgctctcacatcttctgtgatcagcatggcagtggtgagtttagtcgctcaccagctatctgtcctgcctgcaacagtaccctttctggaaagctagatattgtccgcacagaactcagtccatcagaggaatataaagctatggtattggcaggactgcgaccagagatcgtgttggacattagctcccgagcgctggccttctggacatatcaggtacatcaggaacgtctctatcaagaatacaatttcagcaaggctgagggccatctgaaacagatggagaagatatatactcagcaaatacaaagcaaggatgtagaattgacctctatgaaaggggaggttacctccatgaagaaagtactagaagaatacaagaaaaagttcagtgacatctctgagaaacttatggagcgcaatcgtcagtatcaaaagctccaaggcctctatgatagccttaggctacgaaacatcactattgctaaccatgaaggcacccttgaaccatccatgattgcacagtctggtgttcttggcttcccattaggtaacaactccaagtttcctttggataatacacctgttcgaaatcggggcgatggagatggagattttcagttcagaccattttttgcgggttctcccacagcacctgaacccagcaacagcttttttagttttgtctctccaagtcgtgaattagagcagcagcaagtttctagcagggccttcaaagtaaaaagaatttgagccacgcatagtgtcacgcacctgtgatcccagctacttaggaggttgaggctgggaggatcacttgagcccaggagtctgaggctttagtgatctaagatcatgccactgcactccagcctgggcaacagagtgagaccctgtttctaaaaaaaaataaagataatttagctaactttaaaaaaaaaaaaaaaaaaa

SEQ ID NO: 6848 - DNA, 1555 bp, Homo Sapiens
  NM_182854
gggcgatcagaagcaggtcacacagcctgtttcctgttttcaaacggggaacttagaaagtggcagcccctcggcttgtcgccggagctgagaaccaagagctcgaaggggccatatgacactcctcccggacccctggacacacacagccctggagactggagccttggagcatggcaagtccagagcaccctgggagccctggctgcatgggacccataacccagtgcacggcaaggacccagcaggaagcaccagccactggccccgacctcccgcacccaggacctgacgggcacttagacacacacagtggcctgagctccaactccagcatgaccacgcgggagcttcagcagtactggcagaaccagaaatgccgctggaagcacgtcaaactgctctttgagatcgcttcagctcgcatcgaggagagaaaagtctctaagtttgtggtgtaccaaatcatcgtcatccagactgggagctttgacaacaacaaggccgtcctggaacggcgctattccgacttcgcgaagctccagaaagcgctgctgaagacgttcagggaggagatcgaagacgtggagtttcccaggaagcacctgactgggaacttcgctgaggagatgatctgtgagcgtcggcgcgccctgcaggagtacctgggcctgctctacgccatccgctgcgtgcgccgctcccgggagttcctggacttcctcacgcggccggagctgcgcgaggctttcggctgcctgcgggccggccagtacccgcgcgccctggagctgctgctgcgcgtgctgccgctgcaggagaagctcaccgcccactgccctgcggccgccgtcccggccctgtgcgccgtgctgctgtgccaccgcgacctcgaccgccccgccgaggccttcgcggccggagagagggccctgcagcgcctgcaggcccgggagggccatcgctactatgcgcctctgctggacgccatggtccgcctggcctacgcgctgggcaaggacttcgtgactctgcaggagaggctggaggagagccagctccggaggcccacgccccgaggcatcaccctgaaggagctcactgtgcgagaatacctgcactgagccggcctgggaccccgcagggacgctggagatttggggtcaccatggctcacagtgggctgtttggggttctttttttttatttttccttttcttttttgttatttgagacagtcttgctctgtcacccagactgaagtgcagtggctcaattatgtctcactgcagcctcaaactcctgggcacaagcaatcctcccacctcagcctcccaagtagctgggattacaggtgcacaccaccacaccaggctaatttttaattttttagtagagacagggtctctctgttgcccaggctggtctctaacttctgaccttaaatgatcttcctgcctcagcttcccaaaacactggggttacaagtgtgagccaccacccctggcctggggttcatttttaatgggaaaagccactgggggctctaactcgc

SEQ ID NO: 6849 - DNA, 8532 bp, Homo Sapiens
  NM_182898
aacatttacaacaaagttgattctgtgtagggttggaggctagacagttccacaaatttttagtcacattttccatgtcagttaaatctagggagttcaagactactggaaaaattagtctcattactaaaagaaacttagagaccgagggaggtaccagagtctaggaggtacctctgggttgcagaagtaattgtaaaataccagacctgttctttttactaaaagctagtttcactatcttctggtctgaaatactgaggcaaatactcaagacttattttcttcctaatcttgctggtgaaacagaagttactagaaagaaaggaagaaaaaacttgatttggtgactgcaggaagcaacacgttgctgcttttattctacagataatgatttatgaggaatccaagatgaatttggagcaggagaggccgtttgtctgcagtgccccaggctgctcccagcgcttcccaacagaggaccatctgatgattcataggcacaaacatgaaatgactttgaagtttccttcaataaaaacagacaatatgttatcagatcaaactccgaccccaacgagattcctgaagaactgcgaggaggtgggcctcttcagcgagctggactgctccctggagcacgagttcaggaaggctcaggaagaggagagcagcaagcggaatatctcgatgcataatgcagttggtggggccatgacggggcccggaactcaccagcttagcagcgctcggctgcccaaccatgacaccaacgttgtgattcagcaagccatgccgtcgcctcagtccagctctgtcatcactcaggcaccttccaccaaccgccagatcgggcctgtcccaggctctctatcttctctgctacatctccacaacagacagagacagcccatgccagcctccatgcctgggaccctgcccaaccctacaatgccaggatcttccgccgtcttgatgccaatggagcgacaaatgtcagtgaactccagcatcatggggatgcaaggtccaaatctcagcaacccctgtgcttctccccaggtccagccaatgcattcagaagccaaaatgaggttgaaggctgcattgactcaccaccctgctgccatgtcaaatgggaacatgaacaccatgggacacatgatggagatgatgggctcccggcaggaccagacgccacaccatcacatgcactcgcacccgcatcagcaccagacactgccaccccatcacccttacccacaccagcaccagcacccagcacaccatcctcaccctcaaccccatcaccagcagaaccatccacatcaccactcccattcccaccttcatgcacacccagcacatcaccagacctcgccacatccgcccctgcacaccggcaaccaagcacaggtttcaccagcaacacaacagatgcagccaacccagacaatacagccaccccagcccacaggggggcgccggcgaagggtggtagacgaggatccggacgagaggcggcggaaatttctggaacggaaccgggcagctgccacccgctgcagacagaagaggaaggtctgggtgatgtcattggaaaagaaagcagaagaactcacccagacaaacatgcagcttcagaatgaagtgtctatgttgaaaaatgaggtggcccagctgaaacagttgttgttaacacataaagactgcccaataacagccatgcagaaagaatcacaaggatatctaagtccagagagtagccctcctgctagtcctgtcccagcttgctcccagcaacaagtcatccagcataataccatcactacttcctcatcggtcagcgaggtggtaggaagctccaccctcagccagctcaccactcacagaacagacctgaatccgattctttaaaatgcaccatcagacctggcctccaagaagagctgtagcgtaccatgcgtcctttcttttaagggcatttttagaattaactcagacctggaagactcctcagttcttcaaagactggctttcatttttatagttattatggaaatgttgtcttttatacttagttatataagaaaaaagggagttatgcaattaatatctatcagcttgggaaacgctttggtgcttttctccagttttctggtaccagttacttgtttataaactgaaccttttctgtatatagccatggtttcattcttatcagtccaaccctttgcctgaaacattgaatcttgttaaaccacagcttttagctaaaatgaggtatacctagatgtcaagtaagacagatccaaggtaactgggtaggaaatcttttgacatcttaactcatgttgagtttgtgctgtggtgtcaccagaattccagataaacacacagcctttcccatacctttttttttcttactataaaatattataagatccattgatgtccaaataataccaccaagcatctcttcacctctcctcctcttggtccacttgctaatgcccagttttcttctccatttccactttttcttaggctccctatttactattcattttgacttccttctgttttatttttttccctttagcattgcatgtgaataagaaaataatgtttaaagaaaaaaaaaaaaaagcaaacctccaaaacgtggacctaaccattgcttcacttacacttcacccacagctggagttcattcaactcttgcttttcacaaaatagtaaccaggagatgtttaatgtgcctgatttaatgtttttaataatcacagcaaatgaaaggtggtttagttataagtgaagcatggttgaataccagctggggagacactagggaagggagctttgtaagccttgattgcgaaagtccaaattttgatgtggggctataacatgacacccttggattgcgactggttttatacggcctgcctataacgttgaaaatccatgtactacataataattcagaagggctctattcactacacagattacattgttcaatcatcagctgctaatagcctaagatttatttttttttttttcttaagcctatggaaccggctttgctgttctggggggtgaaaatagactaactactggagaaacaaagagagaaagaaaacccagtgtttccataggggcacttttagccttcccacaacagttaagcactctttgactgctgaaggaaccccatggatgaggtgcaggctacttcactctttttttttcttttttgagacagagtctcacctattgcccagactgaagtgcagtggtgcgatcatggatcactgcagcagcatcctccgagttcaagctatccttccacctccgcctcctgagtagctgggaccacaggttcacataaccatgcctggctaatttatttttacttttattttaaaataaaagatgaggtctgtcttatgttgcccaggctggtctcaaactatcctacttcttcctcccaaagtgttgggattataggtgtgagccactgcacccagcctacttcactcttctgaattattctgatttattttcaacaacttttgtgaacttgcccgtgatacaaagcagatagtccctgaaccacagtcgtgcctccttgaaacaagccattctactgtgctaatgttttaatatcacatctcacaaataacaggggtgaatgtttctctctagcaatctaggcaggtgctggtgtttcatctccatttgaatgcttgacctcttaatgtgtgtgtgtgtgtgtgtgtgtgtgtgtgtgttcatgggttttaaaagaacagtattttacaaaaggtgtagcttttataagagtgcagaaaagggaaggatgtgtttttttctctcactatagtataagaatctattttggagaaaaaaagaaaatatgagggtctcgaagcatgatttttatataactagtttcagttttatctaataacttactttttaaatcaatatttatcaacaatctttccttgtatgcagtgctttcaaaagatggttttgagtgtccagtgaaacttatgacttggatatatggttgaagaatcaaaacaaaagcaaaaaaaaaaagcaaaaaaagaaaagagaaaaaaagaaaaaatgcaaatggaataattttctattatattttagacaaacatatcattttcgagtattttaaatactgaattcatagttgttgttttttaaattccaacagtaacagctgaatggtttaatctgactggcttcctaagaaatgtttaagactcagctttaaaaagaagttaacattcatatctctgttttgaaatcaaaaatcatatttcaaaattctttcctaggaccatctatgtgtctcccctcccctccacaaaaaggagaaagagtgcattaaaatgtttagttgggttttttaatttttaatttttatgttatgttttgctttgttttaagtaaacaaaaatttttctttctttactgcatgcatagcacttaataaaatggatttttaaaaaatccactagtaatatcagaatgtccagggagtgactgtcactacaatgatggtttagtttacttctgttccaccttttgattgaaatatttagttgttaggctgaaagcctcggcagttaagaacttgcctgagttttcttcgttcagcaacttgacagtttgactgatgtgcattatatatagctcaattatgtctgttttttatgctaagtaggaaaaccaaccacacacattagcaaaccggcctcaacatataattagaataaactgtcttcttgttctactcagggcctttaggtgtgttcattcacggtatggaaatacagtaaatgaaagattccaactagttgtcagtgcttcttgaaattccaaacagaaagatacattggtcaaatccaacacttggcttatcaatattaagtcttttacctaaaggcccagccgtcaccagacaacagaataatcaatctgcctgaaaatccctcctccttgtcctacactttttgcctgtttgggagaatatctttgtactccattctcctccctcagccagttactgggtcacccatccatgtgttcatgaatcaatcatcacggcctgcagagcacctgtcctaaggagggaaaatcctgtcacactgcctctccccattcgtgtgtggttttcttgatcggtgagatctgtctctgaagtcactgccagcctccctgggaacgtctatagtgcctcccctgccttatgtgatgggagttaacaactcagataagtacacctgagagcatttctatcaggtaaactgtcacttaaatggaggtgtccacatcttaattgtttctccttgacacatttctcaatccacgaagccaggagaggtagagtgaaaatcccagccatggatgaatgtactaatttgaaagccaagtgttaagtcggatgttttcccgttacactactactcagccctctcctgcggccacatcaacggatgcaagtcacagtcttaacacagcctgtgggagacaagcagtttgtgtgctcacagtatatattatagtaattagggtgacttagagcaaatactcttcagatcctatgtagtcagtgaaacaaaatggagagcgtattctgatagaaggacgtcgacggtgaatgttctggtggttgttgcctgttaagtaaactttagtgtgtaagttgagtttgtcattaaaatcataaaccagctgcggtaacagacaagcctttggctggggagttttaagcctcggtaactgctataaaactagccatccagttaggatagaatgtgtttctttctggttaaaaaaaggaaaaaccatctaagaaaatatatatgtatgtatgtgtgtatacagtggaattcaaaggaccaaagcaaaatttgaacaggaatctattaatttagaattttataagatatttattaataaatgttatttttaaacattccatttgaacagtattctgtaggatctacttgtttttaaagtgttagtccataataaactactatagttatgtgtattttcatttttcagggtttcaaatggctattctccatcatttggtggaaatgtttgcttagatctctgtgcatagacatttcaaggatttttattgctctgtgagttattttttaatcaacattctgaacagttttttttaaacatttatttctgtgtgttcatttttaaagtaagctctttcatttaggaagcagagttcagctaaagggaatcagtaactctaactggaacagctttcttgtagaagtgtaaaaacagcttcatctctgcctctctccaccccaccccaatttcctagaaagccttgcactattcagctcccttagtgctttttgtcccttcccgaacaatatgcagtagctttaagccattcaagctccattatgcagtatatctgagaagggaaaggaaacaacccatttaaatttgaataaaaccgtgcctatgcgaacagtagcaatttagaatctcttttctgcttttaaaataatttatatttaaaaattgcactttagctttttgatccctttgtatttctcttattctctttctaacctcttctctgtcctcaaacttgcctttgctctcctttacaataccccccacccctcctccaaggctctgagcggcatcatttaaaatactttacagatatttgcaccaggtacatttatgtgcgtccattggtagcacagctgagacctgtgtctcacatcagcctaggtgaagcctactacaagaatgccaaggagaagagccagtacactatatggtttatactctttatccctttattcatagcatgttttttaaaaatgttatattatgcaacagatgtgaggcagcagctaagctatacttaagaattttctctcaccttccaaaccaaagtgtcctgaataagccaggagacttattcttttgtgcaccctggtgcacatctgactgttgtcctagccatagactctctgaggccactgaaagaacagtggccctatcgatttcattcctaggtctcaaaaatacaatgttgccttgtaacataattagggacagcacctctatttcacaattataatctaaggtaggataagacgacacagcagcaataaacttacaagtaaaattcaataccaaaacaaacacaaagaaatttaaaaaacaaaaaacctagctcatcatgttgtgaaaatgaaaaagtgaatgtccattcaaaatattttactatttcttgtggagtttttcagtgatgtaatgcttgtagccaaattgcttaaagagtgtttatatatttttttccttataaattgtctattttttaaaaaagctatttaaccacagctgaagtggggggtaaggccaaattgccaacacttgttaaaagattaatactcttaagtggcactctgatacctttccaacttgtcatcagaaaggaatcaataattaccaactgttgtatttagaccaacttacaatatctagctcattagaagccaggatctagaaagctccttctaagccatttaagatattcttacattgagcttcatattatagaactttataggattggatattttacaatagaataatttagcctcaggactgagaatgtggaagctgaataaattagctttaaatacatcattaaaatcttatgcacaataagctcattagattctagttttctcctttagaataccaatgccacagacactacaggagataatgaaaggtatcagttgtgttgagtggagggagtttaagagaaaggacccttcccaaccagcagccagtagaaaatacaacctactcacctttttcccttctaagttctgctaaatcacatctgcctcatagagaaaggaatgttgcctttgagaactgtcttggagaacagataagcttgaaatgttctctctagagaggacatagggtttgggatcctctgaaaaggcccagaaaaatagctcagttcaaatacaatgttctaggacaattggaatataaatattgtccaaaaatataattaaaagaaaaaagtttagcactgtgtaaagtaagtgttaactgaggaagtcccaaaaaggtgctgtcactttaagttctggacttggggttctttgtatttgtaaacagcaaagcatttgtgtttgtttgtctatttgtaaagcaaccaccttccttattggaaggagaaaaaaaggggtacatacatgtaaatacttgctgcagcatttaatatgtttaattttgtgttaagctttttgttgcatcgtgaacacatttattgttaccaatggacaatgagttcattaagactgttcaactaggtcagatttttacatctctttctagcaagaagagacaagattttgtgcatttgtacaaatgttaatatcactgcaattccaatataataaagcactcaaatgcaaataa

SEQ ID NO: 6850 - DNA, 1427 bp, Homo Sapiens
  NM_182901
agatgaaaatggaaggggcgggcgcgctaggcctagtcctggctgggctcccgctggagtgtgcgttgggggcggaccaggagcggtggtctccagggaggtcgaggctggggctcccacccggatttggagcagggtcgccgcggcccagctgacccgccggcgtttgtacgttgtgtgcccactcagggagccatggacaactgtttggcggccgcagcgctgaatggggtggaccgacgttccctgcagcgttcagcaaggctggctctagaagtgctggagagggccaagaggagggcggtggactggcatgccctggagcgtcccaaaggctgcatgggggtccttgcccgggaggcgccccacctagagaaacagccggcagccggcccgcagcgcgttctcccgggagagagagaagagagacccccaacccttagtgcttccttcagaacaatggctgaattcatggactatacttcaagtcagtgtgggaaatattattcatctgtgccagaggaaggaggggcaacccatgtctatcgttatcacagaggcgagtcgaagctgcacatgtgcttggacatagggaatggtcagagaaaagacagaaaaaagacatcccttggtcctggaggcagctatcaaatatcagagcatgctccagaggcatcccagcctgctgagaacatctctaaggacctctacatagaagtatatccagggacctattctgtcactgtgggctcaaatgacttaaccaagaagactcatgtggtagcagttgattctggacaaagcgtggacctggtcttccctgtgtgatgttgaccatcactgccatcacatcacctttttttaagtagtaagaataaagccactgtatgattctcttaatagctatacattaatcctgtttttagtgctgactgggtcagccttccgggaactggagtctgtctctttcagtgcttttttgtttgtttggttggtttttttttgagacagtctcactctgttgcccaggctggagtgcagtggcgtgatctcggctcactgcaagttccgcctcccgggttcacaccattctcctgcctcagcctcccgagtagctggcactacaggcacccgccaccatgcccggctattttttttgtatttttagtagagacggggtttcaccatgttggccaggatggtctcgatctcttgacctcgtgatccacccaccttggcctcccaaagtgttgggattacaggcgtgagccaccgcgcccggcctcagtgccttttttaacttgagggtgtagaggtcctccacgcttgtttgcctgaaagtaatataatgatgctgtctgaacaggttttactgcttgctttccaagtaaaggttaattatgataataaagagatttggaaatgaa

SEQ ID NO: 6851 - DNA, 4675 bp, Homo Sapiens
  NM_182907
cagtagcatcgcccatttgccattcactgcagtagcaaaagtagtactctgtggtgggttaatcggtttgaggcagctccttaaatgaacatttgtgtttcatttttctgttattttcccgaacatgaaaagacgataaaactgaaatggaaaagatctattccagaggggagcttcaccacttcattgacggctttaatgaagagaaaagcaactggatgcgctatgtgaatccagcacactctccccgggagcaaaacctggctgcgtgtcagaacgggatgaacatctacttctacaccattaagcccatccctgccaaccaggaacttcttgtgtggtattgtcgggactttgcagaaaggcttcactacccttatcccggagagctgacaatgatgaatctcacacaaacacagagcagtctaaagcaaccgagcactgagaaaaatgaactctgcccaaagaatgtcccaaagagagagtacagcgtgaaagaaatcctaaaattggactccaacccctccaaaggaaaggacctctaccgttctaacatttcacccctcacatcagaaaaggacctcgatgactttagaagacgtgggagccccgaaatgcccttctaccctcgggtcgtttaccccatccgggcccctctgccagaagactttttgaaagcttccctggcctacgggatcgagagacccacgtacatcactcgctcccccattccatcctccaccactccaagcccctctgcaagaagcagccccgaccaaagcctcaagagctccagccctcacagcagccctgggaatacggtgtcccctgtgggccccggctctcaagagcaccgggactcctacgcttacttgaacgcgtcctacggcacggaaggtttgggctcctaccctggctacgcacccctgccccacctcccgccagctttcatcccctcgtacaacgctcactaccccaagttcctcttgcccccctacggcatgaattgtaatggcctgagcgctgtgagcagcatgaatggcatcaacaactttggcctcttcccgaggctgtgccctgtctacagcaatctcctcggtgggggcagcctgccccaccccatgctcaaccccacttctctcccgagctcgctgccctcagatggagcccggaggttgctccagccggagcatcccagggaggtgcttgtcccggcgccccacagtgccttctcctttaccggggccgccgccagcatgaaggacaaggcctgtagccccacaagcgggtctcccacggcgggaacagccgccacggcagaacatgtggtgcagcccaaagctacctcagcagcgatggcagcccccagcagcgacgaagccatgaatctcattaaaaacaaaagaaacatgaccggctacaagacccttccctacccgctgaagaagcagaacggcaagatcaagtacgaatgcaacgtttgcgccaagactttcggccagctctccaatctgaaggtccacctgagagtgcacagtggagaacggcctttcaaatgtcagacttgcaacaagggctttactcagctcgcccacctgcagaaacactacctggtacacacgggagaaaagccacatgaatgccaggtctgccacaagagatttagcagcaccagcaatctcaagacccacctgcgactccattctggagagaaaccataccaatgcaaggtgtgccctgccaagttcacccagtttgtgcacctgaaactgcacaagcgtctgcacacccgggagcggccccacaagtgctcccagtgccacaagaactacatccatctctgtagcctcaaggttcacctgaaagggaactgcgctgcggccccggcgcctgggctgcccttggaagatctgacccgaatcaatgaagaaatcgagaagtttgacatcagtgacaatgctgaccggctcgaggacgtggaggatgacatcagtgtgatctctgtagtggagaaggaaattctggccgtggtcagaaaagagaaagaagaaactggcctgaaagtgtctttgcaaagaaacatggggaatggactcctctcctcagggtgcagcctttatgagtcatcagatctacccctcatgaagttgcctcccagcaacccactacctctggtacctgtaaaggtcaaacaagaaacagttgaaccaatggatccttaagattttcagaaaacacttattttgtttcttaagttatgacttggtgagtcagggtgcctgtaggaagtggcttgtacataatcccagctctgcaaagctctctcgacagcaaatggtttcccctcacctctggaattaaagaaggaactccaaagttactgaaatctcagggcatgaacaaggcaaaggccatatatatatatatatatatatctgtatacatattatatatacttatttacacctgtgtctatatatttgcccctgtgtattttgaatatttgtgtggacatgtttgcatagccttcccattactaagactattacctagtcataattattttttcaatgataatccttcataatttattatacaatttatcattcagaaagcaataattaaaaaagtttacaatgactggaaagattccttgtaatttgagtataaatgtatttttgtcttgtggccattctttgtagataatttctgcacatctgtataagtacctaagatttagttaaacaaatatatgacttcagtcaacctctctctctaataatggtttgaaaatgaggtttgggtaattgccaatgttggacagttgatgtgttcattcctgggatcctatcatttgaacagcattgtacataacttgggggtatgtgtgcaggattacccaagaataacttaagtagaagaaacaagaaagggaatcttgtatatttttgttgatagttcatgtttttcccccagccacaattttaccggaagggtgacaggaaggctttaccaacctgtctctccctccaaaagagcagaatcctcccaccgccctgccctccccaccgagtcctgtggccattcagagcggccacatgacttttgcatccattgtattatcagaaaatgtgaagaagaaaaaaatgccatgttttaaaaccactgcgaaaatttccccaaagcataggtggctttgtgtgtgtgcgatttgggggcttgagtctgggtggtgttttgttgttggtttttgttgctttttttttttttttttttttaatgtcaaaattgcacaaacatggtgctctaccaggaaggattcgaggtagataggctcaggccacactttaaaaacaaacacacaaacaacaaaaaacgggtattctagtcatcttggggtaaaagcgggtaatgaacattcctatccccaacacatcaattgtattttttctgtaaaactcagattttcctcagtatttgtgtttttacattttatggttaatttaatggaagatgaaagggcattgcaaagttgttcaacaacagttacctcattgagtgtgtccagtagtgcaggaaatgatgtcttatctaatgatttgcttctctagaggagaaaccgagtaaatgtgctccagcaagatagactttgtgttattctatcttttattctgctaagcccaaagattacatgttggtgttcaaagtgtagcaaaaaatgatgtatatttataaatctatttataccactatatcatatgtatatatatttataaccacttaaattgtgagccaagccatgtaaaagatctactttttctaagggcaaaaaaaaaaaaaaaaaaaaaagaacactcctttctgagactttgcttaatacttggtgacctcacaatcacgtcggtatgattgggcacccttgcctactgtaagagaccctaaaaccttggtgcagtggtggggaccacaaaacaaccagggaggaagagatacatcattttttagtattaaggaccatctaagacagctctattttttttttgccactttatgattatgtggtcacacccaagtcacagaaataaaaaactgactttaccgctgcaatttttctgttttcctccttactaaatactgatacattactccaatctattttataattatatttgacattttgttcacatcaactaatgttcacctgtagaagagaacaaatttcgaataatccagggaaacccaagagccttactggtcttctgtaacttccaagactgacagctttttatgtatcagtgtttgataaacacagtccttaactgaaggtaaaccaaagcatcacgttgacattagaccaaatacttttgattcccaactactcgtttgttctttttctccttttgtgctttcccatagtgagaatttttataaagacttcttgcttctctcaccatccatccttctcttttctgcctcttacatgtgaatgttgagcccacaatcaacagtggttttattttttcctctactcaaagttaaaactgaccaaagttactggctttttactttgctagaacaacaaactatcttatgtttacatactggtttacaatgttatttatgtgcaaattgtcaaaatgtaaattaaatataaatgttcatgctttaccaaaaa

SEQ ID NO: 6852 - DNA, 2720 bp, Homo Sapiens
  NM_182919
gcggggtggagccagcgccctcagcgcgctacggtccgcgggcaactccgcagaagccccagcccccaggaccccaggacccagtggcgcagccggcagccccggatccctgatctgcttgggcagctcctgcagaacctggaacagtgaatgggtaggggacactgggcgtgcagaaggcggggggcagtgtggaacatgccttcaccacctccagcttctgctgccggaggctgcacccacctgtgcccatggcctgcacaggcccatcacttcctagcgccttcgacattctaggtgcagcaggccaggacaagctcttgtatctgaagcacaaactgaagaccccacgcccaggctgccaggggcaggacctcctgcatgccatggttctcctgaagctgggccaggaaactgaggccaggatctctctagaggcattgaaggccgatgcggtggcccggctggtggcccgccagtgggctggcgtggacagcaccgaggacccagaggagcccccagatgtgtcctgggctgtggcccgcttgtaccacctgctggctgaggagaagctgtgccccgcctcgctgcgggacgtggcctaccaggaagccgtccgcaccctcagctccagggacgaccaccggctgggggaacttcaggatgaggcccgaaaccggtgtgggtgggacattgctggggatccagggagcatccggacgctccagtccaatctgggctgcctcccaccatcctcggctttgccctctgggaccaggagcctcccacgccccattgacggtgtttcggactggagccaagggtgctccctgcgatccactggcagccctgcctccctggccagcaacttggaaatcagccagtcccctaccatgcccttcctcagcctgcaccgcagcccacatgggcccagcaagctctgtgacgacccccaggccagcttggtgcccgagcctgtccccggtggctgccaggagcctgaggagatgagctggccgccatcgggggagattgccagcccaccagagctgccaagcagcccacctcctgggcttcccgaagtggccccagatgcaacctccactggcctccctgatacccccgcagctccagaaaccagcaccaactacccagtggagtgcaccgaggggtctgcaggcccccagtctctccccttgcctattctggagccggtcaaaaacccctgctctgtcaaagaccagacgccactccaactttctgtagaagataccacctctccaaataccaagccgtgcccacctactcccaccaccccagaaacatcccctcctcctcctcctcctcctccttcatctactccttgttcagctcacctgaccccctcctccctgttcccttcctccctggaatcatcatcggaacagaaattctataactttgtgatcctccacgccagggcagacgaacacatcgccctgcgggttcgggagaagctggaggcccttggcgtgcccgacggggccaccttctgcgaggatttccaggtgccggggcgcggggagctgagctgcctgcaggacgccatagaccactcagctttcatcatcctacttctcacctccaacttcgactgtcgcctgagcctgcaccaggtgaaccaagccatgatgagcaacctcacgcgacaggggtcgccagactgtgtcatccccttcctgcccctggagagctccccggcccagctcagctccgacacggccagcctgctctccgggctggtgcggctggacgaacactcccagatcttcgccaggaaggtggccaacaccttcaagccccacaggcttcaggcccgaaaggccatgtggaggaaggaacaggacacccgagccctgcgggaacagagccaacacctggacggtgagcggatgcaggcggcggcactgaacgcagcctactcagcctacctccagagctacttgtcctaccaggcacagatggagcagctccaggtggcttttgggagccacatgtcatttgggactggggcgccctatggggctcgaatgccctttgggggccaggtgcccctgggagccccgccaccctttcccacttggccggggtgcccgcagccgccacccctgcacgcatggcaggctggcacccccccaccgccctccccacagccagcagcctttccacagtcactgcccttcccgcagtccccagccttccctacggcctcacccgcaccccctcagagcccagggctgcaacccctcattatccaccacgcacagatggtacagctggggctgaacaaccacatgtggaaccagagagggtcccaggcgcccgaggacaagacgcaggaggcagaatgaccgcgtgtccttgcctgaccacctggggaacacccctggacccaggcatcggccaggaccccatagagcaccccggtctgccctgtgccctgtggacagtggaagatgaggtcatctgccactttcaggacattgtccgggagcccttcatttaggacaaaacgggcgcgatgatgccctggctttcagggtggtcagaactggatacggtgtttacaattccaatctctctatttctgggtgaagggtcttggtggtgggggtattgctacggtcttttaattataataaatatttattgaatgcttccgcaaaaaaaaaaaaaaaaaa

SEQ ID NO: 6853 - DNA, 2625 bp, Homo Sapiens
  NM_182922
agacgacgcgccgtgcgcctgcgcacggcttgcccatgtgtgctgcagccgtcagccggcccagctgagcagcagcaacggaccttgttaacggcgcggcagcctccaccgcctgctgttgccctcctctctcggtggtctgtccgcccagcgcacgtcaccatgggcaagagccggacgaagcgcttcaagcgacctcagttctcccctacgggcgactgtcaggccgaggcggctgcggcggcgaatgggaccggaggcgaggaggacgacgggccggcggcggagctgctggaaaagctccagcacccgagcgccgaggtccgcgagtgcgcctgcgcagggctggcccggctggtgcagcagcggccggcactcccgggcctggcgcgacgagacgccgtgcgccgcctcgggccgctgctgctagaccccagcctggccgtcagggagactgcagccggcgcgctgagaaatctcagtgcttgtggaggttttgaagtttgtgatgacatggtgactaaggatatcatgacccctctggttgcgctgctaaaagagtgtagtgctggactggattcaaatgagatgtctctgcaggagaaaaaagatcagaacagaaattctattgagaacatagccaatgagactgtgaacgtgctgtggaatatatgtgaatgcagtagtagagcagtgtctatattcaacaaagaagggtgtttggagattgtgttaaagtatttaagtaggtttcctaccaatgttgacctggctatttcagtagcatattgtttgcagacagtgactgaggataacccagagctgctgaagtctttcagtgctacagcattgaacatgctggaatcagcactgctttctcctgtcagttccatggaatctcttctattgaagacattggtagcaggcacaatttggaatctaaaggacattattccatgcaagagtcaagcagaaatcataaatgccttactaaagatcttatctgaagttttgggaatggatgctggtgaaatggttattcaaatgaaagaggctgaaacgcaaaggttaaaaactgctgcagaggctgaggaaatattagagaacactaatggggatgatttgattgaagatgatgaaatggaaggaatttctcataaaagaagagtcagaaggaaaactttcgtttcagatttacttccgcccactgacaaggaactgagagagactatagcattgctgacagcccaacagactgctctggaaattattgtcaacatgtgctgcaatgaagatccctctgatgacgaatgggaagagctttctagcagtgatgaaagtgacgcatttatggagaattccttcagtgagtgcgggggacagctgttttctcccctctgcctctcccatgaagttcacacggctctcaccaactacctcatcccaaagaagatttttgagaaaactgcctttccaaacagcattgcagttgacctatgttctaggaaccctacttggaaacctttgattagaaaaatgaacactattcagtgcagagccctcttctgtctccagagtcttgtgtccctcctggatgtggagcacctgggaggagccgcagcccttcagacgcttgcacagcatctgtcacagctgcttttttctcaaccagattttgctaaacatgttgactttctagaagccataagtagtgctttgagggcccttttgcaaacaatggcctccaagaacatttcccagtgcatgactcctgatcagctgatgacattatgcaaagcaggcattcatagtagtaatgtcggggttagagtgaatgtcgttagcattttaggaatcactggcagcgtccttgccaaagaagatggtacacttgaaactcttaagaacattgggtgctttctgcttgaagttaccaccaaagatccttcccttgtggtagcaggagaagctttggatgccctctttgatgtttttgcagatggtaaagaagccgaaagagcctcgattcaaattaaattattatctgctctgaaagaattccagccggtctttaaaatgaagatacgtaaagaagggagaggtaactatagcacagatcagctgtgtgttcttgacaatgtgaaaatgaatttgcgaagatttattgcttatcaagaaactgttgagaaaagactgacttcttaaacaatccaaaaaagaaaccagttcttcccccaaagtattcaatgcttagaatactaaaaggttttctttgaatgtatatgtttctgaaagtcattttttaatgattacattctgtacattctgtaaaaacttcaaaacctggccaggcatggtggctcacgcctataatcccagcaccttgggagaccgaggcgggtggatcacttgaggtcaggagtttgaggccagcctggccaacatggtgaaaccgcatgcataagcatggtggcacatgcctgtgatcccagctactcgggaggctgagggaggagagtcggttgaacctgggagacagaggttgcagtgagctgagatcacgctactgcactccagcctgggtgacagagggagaccctgtctccaaaaaaaaaaaaaaaaaaa

SEQ ID NO: 6854 - DNA, 6471 bp, Homo Sapiens
  NM_182945
ccgagccgggagccgagcgcgctgggcgcggccgtcccgctgccgccgccaagcccggagtgcgccagcggccatggttcccgcggcggcgccgggcgcctgagccccgggacgcaagcgctggaggcgggctgccggctgtgcgggcgctccggagagaccgacagaaggtgagcactgtgggctatgggatggatgaggtggagcaggaccagcatgaggcccgactcaaggagctgtttgacagttttgacacgacgggcacagggtccctggggcaggaggaactcaccgacctttgccacatgttgagcttggaggaggtggccccagtgctgcagcagacattacttcaggacaacctcttgggcagggtacattttgaccaatttaaagaagcattaatactcatcttgtccagaactctgtcaaatgaagaacactttcaagaaccagactgctcactagaagctcagcccaaatatgttagaggtgggaagcgttacggacgaaggtccttgcccgagttccaagagtccgtggaggagtttcctgaagtgacggtgattgagccactggatgaagaagcgcggccttcacacatcccagccggtgactgcagtgagcactggaagacgcaacgcagtgaggagtatgaagcggaaggccagttaaggttttggaacccagatgacttgaatgcttcacagagtggatcttcccctccccaagactggatagaagagaaactgcaagaagtttgtgaagatttggggatcacccgtgatggtcacctgaaccggaagaagctggtctccatctgtgagcagtatggtttacagaatgtggatggagagatgctcgaggaagtattccataatcttgatcctgacggtacaatgagtgtagaagattttttctatggtttgtttaaaaatggaaaatctcttacaccatcagcatctactccatatagacaactaaaaaggcacctttccatgcagtctttcgatgagagtggacgacgtaccacaacctcatcagcaatgacaagtaccattggctttcgggtcttctcctgcctggatgatgggatgggccatgcatctgtggagagaatactggacacctggcaggaagagggcattgagaacagccaggagatcctgaaggccttggatttcagcctcgatggaaacatcaatttgacagaattaacactggcccttgaaaatgaacttttggttaccaagaacagcattcaccaggcggctctggccagctttaaggctgaaatccggcatttgttggaacgagttgatcaggtggtcagagaaaaagagaagctacggtcagatctggacaaggccgagaagctcaagtctttaatggcctcggaggtggatgatcaccatgcggccatagagcggcggaatgagtacaacctcaggaaactggatgaagagtacaaggagcgaatagcagccttaaaaaatgaactccgaaaagagagagagcagatcctgcagcaggcaggcaagcagcgtttagaacttgaacaggaaattgaaaaggcaaaaacagaagagaactatatccgggaccgccttgccctctctttaaaggaaaacagtcgtctggaaaatgagcttctagaaaatgcagagaatgtgttagcagaaaagtttggtgacctcgatcctagcagtgctgagttcttcctgcaagaagagagactgacacagatgagaaatgaatatgagcggcagtgcagggtactacaagaccaagtagatgaactccagtctgagctggaagaatatcgtgcacaaggcagagtgctcaggcttccgttgaagaactcaccgtcagaagaagttgaggctaacagcggtggcattgagcccgaacacgggctcggttctgaagaatgcaatccattgaatatgagcattgaggcagagctggtcattgaacagatgaaagaacaacatcacagggacatatgttgcctcagactggagctcgaagataaagtgcgccattatgaaaagcagctggacgaaaccgtggtcagctgcaagaaggcacaggagaacatgaagcaaaggcatgagaacgaaacgcacaccttagaaaaacaaataagtgaccttaaaaatgaaattgctgaacttcaggggcaagcagcagtgctcaaggaggcacatcatgaggccacttgcaggcatgaggaggagaaaaaacaactgcaagtgaagcttgaggaggaaaagactcacctgcaggagaagctgaggctgcaacatgagatggagctcaaggctagactgacacaggctcaagcaagctttgagcgggagagggaaggccttcagagtagcgcctggacagaagagaaggtgagaggcttgactcaggaactagagcagtttcaccaggagcagctgacaagcctggtggagaaacacactcttgagaaagaggagttaagaaaagagctcttggaaaagcaccaaagggagcttcaggagggaagggaaaaaatggaaacagagtgtaatagaagaacctctcaaatagaagcccagtttcagtctgattgtcagaaagtcactgagaggtgtgaaagcgctctgcaaagcctggaggggcgctaccgccaagagctgaaggacctccaggaacagcagcgtgaggagaaatcccagtgggaatttgagaaggacgagctcacccaggagtgtgcggaagcccaggagctgctgaaagagactcttaagagagagaaaacaacttctctggtcctgacccaggagagagagatgctggagaaaacatacaaagaacatttgaacagcatggtcgtcgagagacagcagctactccaagacctggaagacctaagaaatgtatctgaaacccagcaaagcctgctgtctgaccagatacttgagctgaagagcagtcacaaaagggaactgagggagcgtgaggaggtcctgtgccaggcaggggcttcggagcagctggccagccagcggctggaaagactagaaatggaacatgaccaggaaaggcaggaaatgatgtccaagcttctagccatggagaacattcacaaagcgacctgtgagacagcagatcgagaaagagccgagatgagcacagaaatctccagacttcagagtaaaataaaggaaatgcagcaggcaacatctcctctctcaatgcttcagagtggttgccaggtgataggagaggaggaggtggaaggagatggagccctgtccctgcttcagcaaggggagcagctgttggaagaaaatggggacgtcctcttaagcctgcagagagctcatgaacaggcagtgaaggaaaatgtgaaaatggctactgaaatttctagattgcaacagaggctacaaaagttagagccagggttagtaatgtcttcttgtttggatgagccagctactgagttttttggaaatactgcggaacaaacagagccgtttttacagcaaaaccgaacgaagcaagtagaaggtgtgaccaggcggcatgtcctaagtgacctggaagatgatgaggtccgggacctgggaagtacagggacgagctctgttcagagacaggaagtcaaaatagaggagtctgaagcttcagtagagggtttttctgagcttgaaaacagtgaagagaccaggactgaatcctgggagctgaagaatcagattagtcagcttcaggaacagctaatgatgttatgtgcggactgtgatcgagcttctgaaaagaaacaggacctactttttgatgtttctgtgctaaaaaagaaactgaagatgcttgagagaatccctgaggcttctcccaaatataagctgttgtatgaagatgtgagccgagaaaatgactgccttcaggaagagctgagaatgatggagacacgctacgatgaggcactagaaaataacaaagaactcactgcagaggttttcaggttgcaggatgagctgaagaaaatggaggaagtcactgaaacattcctcagcctggaaaagagttacgatgaggtcaaaatagaaaatgaggagctgaatgttctggttttgagacttcaaggcaagattgagaagcttcaggaaagcgtggtccagcggtgtgactgctgcttatgggaagccagtttagagaacctggaaatcgaacctgatggaaatatactccagctcaatcagacactggaagagtgtgtgcccagggttaggagtgtacatcatgtcatagaggaatgtaagcaagaaaaccagtaccttgaggggaacacacagctcttggaaaaagtaaaagcacatgaaattgcctggttacatggaacaattcagacacatcaagaaaggccaagagtacagaatcaagttatactggaggaaaacactactctcctaggctttcaagacaaacattttcagcatcaggccaccatagcagagttagaactggagaaaacaaagttacaggagctgactaggaagttgaaggagagagtcactattttagttaagcaaaaagatgtactttctcacggagaaaaggaggaagagctgaaggcaatgatgcatgacttgcagatcacgtgcagtgagatgcagcaaaaagttgaacttctgagatatgaatctgaaaagcttcaacaggaaaattctattttgagaaatgaaattactactttaaatgaagaagatagcatttctaacctgaaattagggacattaaatggatctcaggaagaaatgtggcaaaaaacggaaactgtaaaacaagaaaatgctgcagttcagaagatggttgaaaatttaaagaaacagatttcagaattaaaaatcaaaaaccaacaattggatttggaaaatacagaacttagccaaaagaactctcaaaaccaggaaaaactgcaagaacttaatcaacgtctaacagaaatgctatgccagaaggaaaaagagccaggaaacagtgcattggaggaacgggaacaagagaagtttaatctgaaagaagaactggaacgttgtaaagtgcagtcctccactttagtgtcttctctggaggcggagctctctgaagttaaaatacagacccatattgtgcaacaggaaaaccaccttctcaaagatgaactggagaaaatgaaacagctgcacagatgtcccgatctctctgacttccagcaaaaaatctctagtgttctaagctacaacgaaaaactgctgaaagaaaaggaagctctgagtgaggaattaaatagctgtgtcgataagttggcaaaatcaagtcttttagagcatagaattgcgacgatgaagcaggaacagaaatcctgggaacatcagagtgcgagcttaaagtcacagctggtggcttctcaggaaaaggttcagaatttagaagacaccgtgcagaatgtaaacctgcaaatgtcccggatgaaatctgacctacgagtgactcagcaggaaaaggaggctttaaaacaagaagtgatgtctttacataagcaacttcagaatgctggtggcaagagctgggccccagagatagctactcatccatcagggctccataaccagcagaaaaggctgtcctgggacaagttggatcatctgatgaatgaggaacagcagctgctttggcaagagaatgagaggctccagaccatggtacagaacaccaaagccgaactcacgcactcccgggagaaggtccgtcagttggaatccaatcttcttcccaagcaccaaaaacatctaaacccatcaggtaccatgaatcccacagagcaagaaaaattgagcttaaagagagagtgtgatcagtttcagaaagaacaatctcctgctaacaggaaggtcagtcagatgaattcccttgaacaagaattagaaacaattcatttggaaaatgaaggcctgaaaaagaaacaagtaaaactggatgagcagctcatggagatgcagcacctgaggtccactgcgacgcctagcccgtcccctcatgcttgggatttgcagctgctccagcagcaagcctgtccgatggtgcccagggagcagtttctgcagcttcaacgccagctgctgcaggcagaaaggataaaccagcacctgcaggaggaacttgaaaacaggacctccgaaaccaacacaccacagggaaaccaggaacaactggtaactgtcatggaggaacgaatgatagaagttgaacagaaactgaaactagtgaaaaggcttcttcaagagaaagtgaatcagctcaaagaacaagtgagcctacccggtcatctctgttcacccacctcacattccagctttaactccagttttacatccctttattgccattaactcgttaacttatgttgtctaataaaggcaaattctattataaaaaaaaaaaaaaaaa

SEQ ID NO: 6855 - DNA, 2793 bp, Homo Sapiens
  NM_182984
gttgccagaagccaggatcatagagacgctcggcctccgccgcacgcgctggcggactaagagtggctggcgaagcgagcggccggcgcgggcccctggcgggcgggcggtacagccccaagcctgagacccggacctgagcatcgcaggcccaggacgaggtggccaggcggcccccatggcgtccctggtctaggcggagaaccgcctgggcgatgagtgagaacctcgacaacgagggcccgaagcccatggagagctgtggccaggagagcagcagtgccctgagctgccctaccgtctcggtgccccctgcagccccggcagccctggaggaggtggagaaagagggcgctggggcggctacagggccggggcctcagcccgggctctacagctacatcagggatgacttgtttacctctgagatctttaaactggagctgcagaacgtgcctcgccacgccagcttcagcgacgtccggcgcttcctgggccgctttggtctgcagccccacaaaaccaaactctttgggcaaccaccctgcgcctttgtgacattccgcagcgctgcagagagggacaaggccctgcgcgttttgcatggtgccctctggaaaggccgcccactcagtgtgcgcctggcccggcccaaggccgaccccatggccaggaggaggcgacaggagggtgagagtgagccaccagtaacacgagtggccgacgtggtgacccctctatggacagtgccctatgctgagcagcttgagcggaagcagctggagtgcgagcaggtgctgcagaaacttgccaaggaaatcgggagcaccaaccgtgccttgctgccctggctgctcgagcagaggcacaagcacaacaaggcctgctgcccgctggagggggtcaggccatcaccccagcagactgagtatcgtaataagtgtgagtttctggttggcgtcggggtggatggggaggataacaccgtgggctgtcggctcggcaagtacaagggcgggacgtgtgctgtggcagccccgtttgacaccgtgcacatccccgaagccaccaagcaggtggtgaaggccttccaggagttcatccggtccactccatactcggcatacgacccagagacgtacacaggccactggaagcagctgactgtgcgcaccagccgccgccaccaggccatggccattgcctacttccacccccagaagctgagccctgaggagctggcagagctgaagacctccctagcgcagcacttcacagcagggccaggcagggccagtggagtgacctgcctctacttcgtggaggagggacagcgaaagactcctagccaggagggcctgcccctggagcatgtggctggggaccggtgcatccacgaggacctgctagggctgaccttccggatctctccacacgccttcttccaggtgaacacacccgcagccgaggtgctctacacagtcatccaggactgggcccaattggatgcggggagcatggtgctggacgtgtgctgtggcaccggcaccattggcctggccctggcccggaaggtaaagagggtcattggggtcgagctatgcccagaggctgtggaggacgcccgggtgaacgcccaggacaatgagttgagtaatgtggagttccactgcgggagggccgaggacctggtgcccaccctggtgagcagactggcctcccagcacctcgtggccatcctggacccaccccgtgctggcttgcattccaaggtgatcctggccatccggagagctaagaacctcaggcggctgctgtacgtctcatgcaacccccgggcagccatgggcaactttgtggacctctgcagagccccatctaaccgggtgaagggcattcccttccggccggtcaaggctgtggcagtggacctgttcccgcagaccccgcactgtgagatgctcatcctgtttgagagggtggagcaccccaatggcacaggggtcttggggccccacagccctccagctcaacccacaccaggacccccagataacaccctacaagaaactgggaccttcccctcatcctaggcccaggacccattatggggacaggagctgaagggctcccagggccccaggggcggggaaggcatggcttgctggccaggatattcagaggtaggcagccaaagggcacagaaccctgtgccccaccaggattggcctgctgctaggggccaggggccctgaccaggaagacaggtgggttcctgtagcctgttgcccatccccagggcctttgtggactagccaaggctgtgagggccagaataaacaactgctcaacaaagggtgtttctgtgatgagagccaggggtctgaacacagggcctgggtgccagggaaagggccaaactaggcctaggcagctctgcaagcctctctgcatggctgggggagtcagggcagagcttactttaaaaaagaatgttcgatttgatacttaaacttgaggagaggcagagagaggtctgggaactgcaccagctgggggcatggggtggagaacactgggcagagttggcccctctgtggccagcctggccctcagcccagcagagagggcatcaaccaaggaaggggccatgctggggtgctgctcagctgttacaaaggcagggtccagcctgcagggaggccccaggaggggatctggccagtcaagggtccacagggtgccagcctctcaccctcagaataaagacatcagccattcaaaaaaaaaaaa

SEQ ID NO: 6856 - DNA, 1869 bp, Homo Sapiens
  NM_183008
gttgctcaggcctccctcaaactagccaatgagaagtgcacgggtcctggtcgcctaggaaaccgcgtgacaacaagatggcggcgctgcgggacggctagcggccctgcgtgtactttcccaagcaccaccaggccaaaggtctctcagttcagagcagaaagccgtatacccagaggagcaggcagataacagaaacttccagaaacctctgtggagacagtggaagaggcaaaagggagttcctgacagctggattctagaagtagaactatgagctcacctttggcctcccttagcaagacccgaaaagtgcccctgccctcggagcctatgaatcctgggaggcgaggaatccgcatctatggagatgaagatgaggtggacatgttgagtgatgggtgtggctcagaagaaaagatctcagtcccttcctgctatggcggcataggtgcccctgtgagtcggcaagtccctgcatcccatgactcggagctgatggccttcatgacgaggaagttgtgggacctggagcagcaggtgaaggcccagactgatgagatactgtccaaggatcagaagatagcggccctagaggacctggtgcagaccctccggccacacccagccgaggcaaccctgcagcggcaggaggaactggagacgatgtgtgtgcagctgcagcggcaggtcagggagatggagcggttcctcagtgactatggcctgcagtgggtgggcgagcccatggaccaggaggactcagagagcaagacagtctcagagcatggcgagagggactggatgacagccaagaagttctggaagccaggggactcattggcgccccctgaggtggactttgacaggctgctggccagcctgcaggatcttagtgagctggtggtagagggtgacacccaagtgacaccagtgcccggcggggcacggctgcgtaccctcgagcccatcccgctgaagctctaccggaatggcatcatgatgttcgacgggcccttccagcccttctacgatccctccacacagcgctgcctccgagacatattggatggcttctttccctcagagctccagcgactgtaccccaatggggtcccctttaaggtgagtgacttgcgcaatcaggtctacctggaggatggactggaccccttcccaggcgagggccgtgtggtgggcaggcagctgatgcacaaggccttggacagggtggaggagcacccaggctccaggatgactgctgagaaatttctgaacaggctccccaagtttgtgatccggcaaggcgaggtgattgacatccggggccccatcagggacaccttgcagaactgctgcccattgcctgcccggatccaggagattgtggtggagacgcccaccttggccgctgagcgagagaggagccaggagtcacccaacacgccggcacccccgctctccatgctgcgcatcaagtctgagaatggggaacaggccttcctactgatgatgcagcctgacaacaccattggggacgtgcgagctctgctagcgcaggccagggtcatggatgcctctgcctttgagatcttcagcacattcccgcccaccctctaccaggacgatacactcacgctgcaggctgcaggccttgtgcccaaagcagcactgctgctgcgggcacgccgagccccgaagtccagcctgaaattcagtcctggtccctgtcccggtcccggtcccggccccagtcccggtcccggtcccggccccagtcccggtcccggtcccggccccagtccctgtcctggacccagtcccagcccccaataaagcacccgccccctcaaaaaaaaaaaaaaaaaa

SEQ ID NO: 6857 - DNA, 4652 bp, Homo Sapiens
  NM_183047
gtgagaactaggagcctgtcctccatgttttataagtattgacattacacagtgttaacaatgcatccacagagcttggctgaagaggaaataaaaacagaacaggaggtggtagagggcatggatatctctactcgctccaaagatcctggctctgcagagagaacagcccagaaaagaaagttccccagccctccacattcttccaatggccactcgccgcaggacacatcaacaagccccattaaaaagaaaaagaaacctggcttactgaacagtaacaataaggagcagtcagaactaagacatggtccgttttactatatgaagcagccactcaccacagaccctgttgatgttgtaccgcaggatggacggaatgatttctactgctgggtttgtcaccgggaaggccaagtcctttgctgtgagctctgtccccgggtttatcacgctaagtgtctgagactgacatcggaaccagagggggactggttttgtcctgaatgtgagaaaattacagtagcagaatgcatcgagacccagagtaaagccatgacaatgctcaccattgaacagttatcctacctgctcaagtttgccattcagaaaatgaaacagccagggacagatgcattccagaagcccgttccattggaacagcaccctgactatgcggaatacatcttccatccaatggacctttgtacattggaaaagaatgcgaaaaagaaaatgtatggctgcacagaagccttcctggctgatgcaaagtggattttgcacaactgcatcatttataatgggggaaatcacaaattgacgcaaatagcgaaagtagtcatcaaaatctgtgaacatgagatgaatgaaatcgaagtatgtccagaatgttatctagctgcttgccaaaaacgagataactggttttgtgagccttgtagcaatccacatcctttggtctgggccaaactgaaggggtttccattctggcctgcaaaagctctaagggataaagacgggcaggtcgatgcccgattctttggacaacatgacagggcctgggttccaataaataattgctacctcatgtctaaagaaattcctttttctgtgaaaaagactaagagcatcttcaacagtgccatgcaagagatggaggtttacgtggagaacatccgcaggaagtttggggtttttaattactctccatttaggacaccctacacacccaacagccagtatcaaatgctgctcgatcccaccaaccccagcgccggcactgccaagatagacaagcaggagaaggtcaagctcaactttgacatgacggcatcccccaagatcctgatgagcaagcctgtgctgagtgggggcacaggccgccggatttccttgtcggatatgccgcgctcccccatgagcacaaactcttctgtgcacacgggctccgacgtggagcaggatgctgagaagaaggccacgtcgagccacttcagtgcgagcgaggagtccatggacttcctggataagagcacagcttcaccagcctccaccaagacgggacaagcagggagtttatccggcagcccaaagcccttctctcctcaactgtcagctcctatcacgacgaaaacggacaaaacctccaccaccggcagcatcctgaatcttaacctggatcgaagcaaagctgagatggatttgaaggagctgagcgagtcggtccagcaacagtccacccctgttcctctcatctctcccaagcgccagattcgtagcaggttccagctgaatcttgacaagaccatagagagttgcaaagcacaattaggcataaatgaaatctcggaagatgtctatacggccgtagagcacagcgattcggaggattctgagaagtcagatagtagcgatagtgagtatatcagtgatgatgagcagaagtctaagaacgagccagaagacacagaggacaaagaaggttgtcagatggacaaagagccatctgctgttaaaaaaaagcccaagcctacaaacccagtggagattaaagaggagctgaaaagcacgtcaccagccagcgagaaggcagaccctggagcagtcaaggacaaggccagccctgagcctgagaaggacttttccgaaaaggcaaaaccttcacctcaccccataaaggataaactgaagggaaaagatgagacggattccccaacagtccatttgggcctggactctgattcagagagcgaacttgtcatagatttaggagaagaccattctgggcgggagggtcgaaaaaataagaaggaacccaaagaaccatctcccaaacaggatgttgtaggtaaaactccaccatccacgacggtgggcagccattctcccccggaaacaccggtgctcacccgctcttccgcccaaacttccgcggctggcgccacagccaccaccagcacgtcctccacggtcaccgtcacggccccggcccccgccgccacaggaagcccagtgaaaaagcagaggccgcttttaccgaaggagactgccccggccgtgcagcgggtcgtgtggaactcatcaactgtccagcagaaggagatcacacagagcccatccacgtccaccatcaccctggtgaccagcacacagtcatcgcccctggtcaccagctcggggtccatgagcacccttgtgtcctcagtcaacgctgacctgcccatcgccactgcctcagctgatgtcgccgctgatattgccaagtacactagcaaaatgatggatgcaataaaaggaacaatgacagaaatatacaacgatctttctaaaaacactactggaagcacaatagctgagattcgcaggctgaggatcgagatagagaagctccagtggctgcaccagcaagagctctccgaaatgaaacacaacttagagctgaccatggcggagatgcggcagagcctggagcaggagcgggaccggctcatcgccgaggtgaagaagcagctggagttggagaagcagcaggcggtggatgagaccaagaagaagcagtggtgcgccaactgcaagaaggaggccatcttttactgctgttggaacactagctactgtgactacccctgccagcaagcccactggcctgagcacatgaagtcctgcacccagtcagctactgctcctcagcaggaagcggatgctgaggtgaacacagaaacactaaataagtcctcccaggggagctcctcgagcacacaatcagcaccttcagaaacggccagcgcctccaaagagaaggagacgtcagctgagaaaagcaaggagagtggctcgacccttgacctttctggctccagagagacgccctcctccattctcttaggctccaaccaaggctctgttagcaaaaggtgtgacaagcaacctgcctatgccccaaccaccacagaccaccagccgcaccccaactaccccgcccagaagtaccattcccggagtaataaatccagttggagcagcagtgatgagaagaggggatcgacacgttccgatcacaacaccagtaccagcacgaagagcctcctcccgaaagagtctcggctggacaccttctgggactagcagtgaatcgggacacaaaccacccaccccattgggagaaaaacccagacgccaggaaaagaagaaacaacaaaggcaggagaacagccactttcagacttgaaaatgacaaaaccctcagttgagcctgagcccccggcgcgggggctgctacactacaggacacccagcatcggctttgactgcagactgttcacccacacgagccctgtgcttttggtgtaaataatgtacaatttgtggatgtcattgaatctagaggactttcccctttttatatttgtattaactttaacttattaaaaaaaaaaaaagaaaaagaaaaacgatttaaaaaaaaaaaaaaaagcaaccaaccccaacaacaaaaaagaatgttttggtattggagaagggatggtcagttagcctgtctgtcacacgacggaatggatactgggcccggggaccactttcatactcacgtcctcatccttggatacccaggggagggcgaaccgttttcgctcgtgtgtctgtacgcagcatgttgggatcgggagtttcggcacagactatcccatcaagccgttggctcctttcagctactacgttaccacgttcctaaaacgcaagctctccggaccagacggacacagggagaagctagtttctttcatgtgattgaaatgatgactctactcctaaaagggaaaaaacaatatccttgtttacagaagagaaacaaacaagccccactcagctcagtcacaggagagaacacagaaagtcttaggatcatgaactctgaaaaaaagagaaaccttatctttgctttgtggttcctttaaacacactcacacacacttggtcagagatgctgtgcttcttggaagcaaggactcaaaggcaaggtgcacgcagaggacgtttgagtctgggatgaagcatgtacgtattatttatatgatggaatttcacgtttttatgtaagcatgaaacacaggcagtatgagagaaagcaaggcccgtcatgctgtccgtac

SEQ ID NO: 6858 - DNA, 4493 bp, Homo Sapiens
  NM_183048
gtgagaactaggagcctgtcctccatgttttataagtattgacattacacagtgttaacaatgcatccacagagcttggctgaagaggaaataaaaacagaacaggaggtggtagagggcatggatatctctactcgctccaaagatcctggctctgcagagagaacagcccagaaaagaaagttccccagccctccacattcttccaatggccactcgccgcaggacacatcaacaagccccattaaaaagaaaaagaaacctggcttactgaacagtaacaataaggagcaggatggacggaatgatttctactgctgggtttgtcaccgggaaggccaagtcctttgctgtgagctctgtccccgggtttatcacgctaagtgtctgagactgacatcggaaccagagggggactggttttgtcctgaatgtgagaaaattacagtagcagaatgcatcgagacccagagtaaagccatgacaatgctcaccattgaacagttatcctacctgctcaagtttgccattcagaaaatgaaacagccagggacagatgcattccagaagcccgttccattggaacagcaccctgactatgcggaatacatcttccatccaatggacctttgtacattggaaaagaatgcgaaaaagaaaatgtatggctgcacagaagccttcctggctgatgcaaagtggattttgcacaactgcatcatttataatgggggaaatcacaaattgacgcaaatagcgaaagtagtcatcaaaatctgtgaacatgagatgaatgaaatcgaagtatgtccagaatgttatctagctgcttgccaaaaacgagataactggttttgtgagccttgtagcaatccacatcctttggtctgggccaaactgaaggggtttccattctggcctgcaaaagctctaagggataaagacgggcaggtcgatgcccgattctttggacaacatgacagggcctgggttccaataaataattgctacctcatgtctaaagaaattcctttttctgtgaaaaagactaagagcatcttcaacagtgccatgcaagagatggaggtttacgtggagaacatccgcaggaagtttggggtttttaattactctccatttaggacaccctacacacccaacagccagtatcaaatgctgctcgatcccaccaaccccagcgccggcactgccaagatagacaagcaggagaaggtcaagctcaactttgacatgacggcatcccccaagatcctgatgagcaagcctgtgctgagtgggggcacaggccgccggatttccttgtcggatatgccgcgctcccccatgagcacaaactcttctgtgcacacgggctccgacgtggagcaggatgctgagaagaaggccacgtcgagccacttcagtgcgagcgaggagtccatggacttcctggataagagcacagcttcaccagcctccaccaagacgggacaagcagggagtttatccggcagcccaaagcccttctctcctcaactgtcagctcctatcacgacgaaaacggacaaaacctccaccaccggcagcatcctgaatcttaacctggatcgaagcaaagctgagatggatttgaaggagctgagcgagtcggtccagcaacagtccacccctgttcctctcatctctcccaagcgccagattcgtagcaggttccagctgaatcttgacaagaccatagagagttgcaaagcacaattaggcataaatgaaatctcggaagatgtctatacggccgtagagcacagcgattcggaggattctgagaagtcagatagtagcgatagtgagtatatcagtgatgatgagcagaagtctaagaacgagccagaagacacagaggacaaagaaggttgtcagatggacaaagagccatctgctgttaaaaaaaagcccaagcctacaaacccagtggagattaaagaggagctgaaaagcacgtcaccagccagcgagaaggcagaccctggagcagtcaaggacaaggccagccctgagcctgagaaggacttttccgaaaaggcaaaaccttcacctcaccccataaaggataaactgaagggaaaagatgagacggattccccaacagtccatttgggcctggactctgattcagagagcgaacttgtcatagatttaggagaagaccattctgggcgggagggtcgaaaaaataagaaggaacccaaagaaccatctcccaaacaggatgttgtaggtaaaactccaccatccacgacggtgggcagccattctcccccggaaacaccggtgctcacccgctcttccgcccaaacttccgcggctggcgccacagccaccaccagcacgtcctccacggtcaccgtcacggccccggcccccgccgccacaggaagcccagtgaaaaagcagaggccgcttttaccgaaggagactgccccggccgtgcagcgggtcgtgtggaactcatcaactgtccagcagaaggagatcacacagagcccatccacgtccaccatcaccctggtgaccagcacacagtcatcgcccctggtcaccagctcggggtccatgagcacccttgtgtcctcagtcaacgctgacctgcccatcgccactgcctcagctgatgtcgccgctgatattgccaagtacactagcaaaatgatggatgcaataaaaggaacaatgacagaaatatacaacgatctttctaaaaacactactggaagcacaatagctgagattcgcaggctgaggatcgagatagagaagctccagtggctgcaccagcaagagctctccgaaatgaaacacaacttagagctgaccatggcggagatgcggcagagcctggagcaggagcgggaccggctcatcgccgaggtgaagaagcagctggagttggagaagcagcaggcggtggatgagaccaagaagaagcagtggtgcgccaactgcaagaaggaggccatcttttactgctgttggaacactagctactgtgactacccctgccagcaagcccactggcctgagcacatgaagtcctgcacccagtcagctactgctcctcagcaggaagcggatgctgaggtgaacacagaaacactaaataagtcctcccaggggagctcctcgagcacacaatcagcaccttcagaaacggccagcgcctccaaagagaaggagacgtcagctgagaaaagcaaggagagtggctcgacccttgacctttctggctccagagagacgccctcctccattctcttaggctccaaccaaggctctgaccattcccggagtaataaatccagttggagcagcagtgatgagaagaggggatcgacacgttccgatcacaacaccagtaccagcacgaagagcctcctcccgaaagagtctcggctggacaccttctgggactagcagtgaatcgggacacaaaccacccaccccattgggagaaaaacccagacgccaggaaaagaagaaacaacaaaggcaggagaacagccactttcagacttgaaaatgacaaaaccctcagttgagcctgagcccccggcgcgggggctgctacactacaggacacccagcatcggctttgactgcagactgttcacccacacgagccctgtgcttttggtgtaaataatgtacaatttgtggatgtcattgaatctagaggactttcccctttttatatttgtattaactttaacttattaaaaaaaaaaaaagaaaaagaaaaacgatttaaaaaaaaaaaaaaaagcaaccaaccccaacaacaaaaaagaatgttttggtattggagaagggatggtcagttagcctgtctgtcacacgacggaatggatactgggcccggggaccactttcatactcacgtcctcatccttggatacccaggggagggcgaaccgttttcgctcgtgtgtctgtacgcagcatgttgggatcgggagtttcggcacagactatcccatcaagccgttggctcctttcagctactacgttaccacgttcctaaaacgcaagctctccggaccagacggacacagggagaagctagtttctttcatgtgattgaaatgatgactctactcctaaaagggaaaaaacaatatccttgtttacagaagagaaacaaacaagccccactcagctcagtcacaggagagaacacagaaagtcttaggatcatgaactctgaaaaaaagagaaaccttatctttgctttgtggttcctttaaacacactcacacacacttggtcagagatgctgtgcttcttggaagcaaggactcaaaggcaaggtgcacgcagaggacgtttgagtctgggatgaagcatgtacgtattatttatatgatggaatttcacgtttttatgtaagcatgaaacacaggcagtatgagagaaagcaaggcccgtcatgctgtccgtac

SEQ ID NO: 6859 - DNA, 3712 bp, Homo Sapiens
  NM_183050
gggtgctccgccctccccgcaggcggcgtgcggctgcatagcctgagaatcccggtggtgagcggggatggcggttgtagcggcggctgccggctggctactcaggctcagggcggcaggggctgaggggcactggcgtcggcttcctggcgcggggctggcgcggggctttttgcaccccgccgcgactgtcgaggatgcggcccagaggcggcaggtggctcattttactttccagccagatccggagccccgggagtacgggcaaactcagaaaatgaatcttttccagtctgtaacaagtgccttggataactcattggccaaagatcctactgcagtaatatttggtgaagatgttgcctttggtggagtctttagatgcactgttggcttgcgagacaaatatggaaaagatagagtttttaataccccattgtgtgaacaaggaattgttggatttggaatcggaattgcggtcactggagctactgccattgcggaaattcagtttgcagattatattttccctgcatttgatcagattgttaatgaagctgccaagtatcgctatcgctctggggatctttttaactgtggaagcctcactatccggtccccttggggctgtgttggtcatggggctctctatcattctcagagtcctgaagcattttttgcccattgcccaggaatcaaggtggttatacccagaagccctttccaggccaaaggacttcttttgtcatgcatagaggataaaaatccttgtatattttttgaacctaaaatactttacagggcagcagcggaagaagtccctatagaaccatacaacatcccactgtcccaggccgaagtcatacaggaagggagtgatgttactctagttgcctggggcactcaggttcatgtgatccgagaggtagcttccatggcaaaagaaaagcttggagtgtcttgtgaagtcattgatctgaggactataataccttgggatgtggacacaatttgtaagtctgtgatcaaaacagggcgactgctaatcagtcacgaggctcccttgacaggcggctttgcatcggaaatcagctctacagttcaggaggaatgtttcttgaacctagaggctcctatatcaagagtatgtggttatgacacaccatttcctcacatttttgaaccattctacatcccagacaaatggaagtgttatgatgcccttcgaaaaatgatcaactattgaccatataggtaggtatgcatcttgagaaagctactatgtgcccctgacattaacgtactgttaaccaagacacagcaatcatcagtgttttgatggtaacaaactttgatggtaaagttggtaaaaggcaactttcagaagaaaataatgtgctttagaaaaaaaattcaaatttatagtagtatatttacatttttgttgttgttgttgttctgagatggagtctcactctgtcgcccaggctagactgcagtggtgcaatctcagctcactgcaacctcccccctacccctgagttcaagcgattctcctgcctcagcctgctgagtagttgggattacaggcgcccaccaccatgcccagctaatttttgtgtttttattggaggtggggtgtcactatgttggctcagctgatttcaaattcctgacctcaagtgatccacctgccttagcctcccaaagtgctgggattacaggcatgagccactgcacctggctatatttacatttaatagaaacatatctagcatatgtatatgtgattttttttttttttttgagaccgagtctcactctgtcaccaggctggagtgcagtggtgcgatcttggctcatggcaacctctgcctcccaggttcaagcgattgtcctgcctcagtctcctgagtagctgggactacaggtgtgcaccaacatgcccagctaattttttatatttttagtagagacggggtttcaccatgttggccaggatggtctcgatctcttgaccttgtgttccacccgccttggcctcccaaagtgctggaattacaggcatgagccaccgcgcctggcctgtatatgtgatttctaaaaaatagatgcatgcatatgttaacattgaatagtcaatcactagatgaagatgctctctaccatggtttagattgcaagtgtactttataccattgtttcaacttcaacctttatttttgtatatattttttcagctacttaaactgttcatgaataggcgtactttctgtatttaaaaatggcccctcaagcaccgttaatttacattccagttatttacatgataattcatgacattctgaaacttgcctgtatattatctgaaaaatggatttcttgagcaaaagatctgtttattgtatgtaaggaaaaattttacctgaaaacaaacaaacaaaccctaaaactcagcaccactaccatttccagaagcttttttaacaagtgaatattttttacataatggataataaatggtatttattcatcatgattttctaagtaatgcttatcagccccttcagtggtgttattctaacaaaatgaatacattacaaattattaagttagcttttcagagttttaatatagaagttactagcactgacacactgattttgaaatgtttcaaaatgagtagatatgattagatcctttaccttttaatatctagtttttccaaaaatgatagtaatatcttttgaagaactatgctttttcaaaagcaaaatcaactctgtataatagcacattctctactttttaaagatcagaaatgctagaattcttgacttttgtgtatgggtagtaaatctagctcactgaaaatcagagtgaaacgcctttacatttgtgcggatagagaagttaactctccctcatatgtcactgtgctaccataatccctacattttctgtctgttctagtctaagaatattgttatagatggaagttaggaccattagcccacagatgcatgtattctctcagacataccggtgtagatgctatatttctgatgtcttcttaatgtctgtgaaagcaactggcatctacaataaatcacacttagagctggttagaggactccttcacttttgttgtccatgtggttcccttccgtggaccagccgtaataaagagccaaggtagtgatggtggccacgtgcctcgttgctatttttaaagtaatattcagatgtggttttaaatttagattatgtattccttttgaaacataagaaaaacatttaaacctatgctgaaaatacgataaaagaaaaacaactccaatatgctaaaagttaaatatggtatttaagaaaatagtcatgtatgcaattgagaaagtctataatttattttacagaaaagctggaagattatgactagatatggaaatattttttctgaatttttttttatatttcctccgacttacctctttttgaaaagagagtttttattaagtgaaccatcacgatattggctgaaaagttctacattctattattgtattgtaacacacatgtattgatgattttcattaagagtttcagattaactttgaaaaatattccacatggtaatcttataaattctgtttaattacatctgtaaatattatgtgtgtgatagtattcaataaagtaaaatcaaattgtc

SEQ ID NO: 6860 - DNA, 4760 bp, Homo Sapiens
  NM_183075
gacactggcgccgcgggtcaggcagctgcgtgcgcgtctcctccaggcagcaaggggaacccgaggccgccggcgcccggaccatgtcgtctccggggccgtcgcagccgccggccgaggacccgccctggcccgcgcgcctcctgcgtgcgcctctggggctgctgcggctggaccccagcgggggcgcgctgctgctatgcggcctcgtagcgctgctgggctggagctggctgcggaggcgccgggcgcggggcatcccgcccgggcccacgccctggcctctggtgggcaacttcggtcacgtgctgctgcctcccttcctccggcggcggagctggctgagcagcaggaccagggccgcagggattgatccctcggtcataggcccgcaggtgctcctggctcacctagcccgcgtgtacggcagcatcttcagcttctttatcggccactacctggtggtggtcctcagcgacttccacagcgtgcgcgaggcgctggtgcagcaggccgaggtcttcagcgaccgcccgcgggtgccgctcatctccatcgtgaccaaggagaagggggttgtgtttgcacattatggtcccgtctggagacaacaaaggaagttctctcattcaactcttcgtcattttgggttgggaaaacttagcttggagcccaagattattgaggagttcaaatatgtgaaagcagaaatgcaaaagcacggagaagaccccttctgccctttctccatcatcagcaatgccgtctctaacatcatttgctccttgtgctttggccagcgctttgattacactaatagtgagttcaagaaaatgcttggttttatgtcacgaggcctagaaatctgtctgaacagtcaagtcctcctggtcaacatatgcccttggctttattaccttccctttggaccatttaaggaattaagacaaattgaaaaggatataaccagtttccttaaaaaaatcatcaaagaccatcaagagtctctggatagagagaaccctcaggacttcatagacatgtaccttctccacatggaagaggagaggaaaaataatagtaacagcagttttgatgaagagtacttattttatatcattggggatctctttattgctgggactgataccacaactaactctttgctctggtgcctgctgtatatgtcgctgaaccccgatgtacaagaaaaggttcatgaagaaattgaaagagtcattggcgccaaccgagctccttccctcacagacaaggcccagatgccctacacagaagccaccatcatggaagtgcagaggctaactgtggtggtgccgcttgccattcctcatatgacctcagagaacacagtgctccaagggtataccattcctaaaggcacattgatcttacccaacctgtggtcagtacatagagacccagccatttgggagaaaccggaggatttctaccctaatcgatttctggatgaccaaggacaactaattaaaaaagaaacctttattccttttgggatagggaagcgggtgtgtatgggagaacaactggcaaagatggaattattcctaatgtttgtgagcctaatgcagagtttcgcatttgctttacctgaggattctaagaagcccctcctgactggaagatttggtctaactttagccccacatccatttaatataactatttcaaggagatgaagagcatctccaagaagagatggtaaaaagatatataaatacatatccttctaagcagattcttcctactgcaaaggacagtgaatccagcaactcagtggatccaagctgggctcagaggtcggaaggagggtagagcacactgggaggtttcatcttggaggattcctcagcaggatacttcagccattttagtaatgcaggtctgtgatttgggggatagaaaacaaagtacctatgaaacgggatatctggattttacttgcagtggcttccaccgatgggccaatcttctcatttcttagtgcctcagacatcccatatgtaaaatgagagtaataaaacttggcttctctctacctctcagcactaatgatggtcaaatgccttacatcttttctgatatctctaaaatgctgttaagttctggagaagaacttcaggagaagaagatctatcagctggcttttaaagacctatgacaacatgaaagtggtgttcagcctggaatgctttgtcagagatgggtgtggatttaggttatactgggggagaacttttctcagcacagattctatgccagcttctttgggcttgttctgtcactatctttttgtttatgattttagtttttactttttgtagatgtgggatgaagtggactctgtcgtgtatattgaggaaaaaagaaattataattttaaaaaatcccttgtaggattattatctaaatttatatgtctaacttctactacaactacaggaacagtgagccttgctacttctttagtagcttcttggcagaattcctttctactgagttatttgcaaagatgcagctctacctttttacttaaggcctgaatggtgagcatggggattttgatactgggactcatcaggaaaggattctgctttcaaactatactgaacattcctgtcctagcgtccctgccaccaggcccaatgcatctgatccttgaatatactctcaaagaattcactctctttttattaagagaactaaattgtttctaaatgtagatggtccctctggaaaagcagttttcagcaggggtggtaaccccttcagagggagtttggaaatgtgtgggtatgattcttggttatcataatgatgggggtgctactggccttctgctgccatgggaccaggatgctaaatgtcaaggtagtcctatacagtgaagaattgtcctgctcaagatgccaggatttcccccagtgagaacatgctctaaggaatgaccacccctttcttttattctcccacagtgctccatgtacagaagtaagcatagcagtcatatgagcaaccacattcctgaacctttcctcatgctggctctacacttaatcctttacttgtatgtttctgtaattcttacataaattctattaagagggtggcatactgtagtggatgaagctgaggcttatagtaggtaaggcacaaagttaaaaagtaacatcactgggtttcaaacctactggtctctgtgactaaagaacactttcagaaccacttcttgattctgccaccacttgatcccataacaggctaccccttggcctcatgctggagttgtgtgtgtctgtcttcatcccaggctgagctccttgaggtgaggatgttgtgctgtttgcctccctcacagtgccttggtcttagtggatgcccagttgtcttgtgaatgacttttaagaagtgtacttaagagaaaaatcctaccttatttgaataattacaagtcatgtttttgttgcttaaaggtgataaatcagtgtatattatttgttaatgtccattaaagccagtttttaaaaaaatcactggacttttgtgtttaccatttaaaacaaccattttaaacaaacttagaacgatgccttagctgtttataggtaacagaatgtaaactcccaccacctggagactaggccatatccagggacctcacactgactttcctaaaggagagaagcagctacgctgttcatactgatagagaagagggcaagaaaagatccagagtggctgttactttgaaaattaaacgaaagatgaaattctgaacttaaaacacttctgtttggccttctataactgatcacccttctttgctctgttttccagataaatggagacaccagatctccctaacctctgacttctgccgttagccatactctgtgtagttagatctcagtctgggaatggcattccagggcaattgtgaacatgaggctagatttttcctttgatttagcacattcctaggcagacttttgcaagctcaaaaaatgaaaataatatctgcttaaccaaaacataatcataggaagaagaaaaattttaaaatgattgatttttgactctacattctttatctaccatactgctcttttcctttttagaaatattactaagcactttccgtatagataaatgaaatacaggctaatctttaggtgtcttaggaatttttgctttttgaaaaagaaaagctaatagcctaactgcagaggaactgagtggatggggtagctgctgtatagatttttagatgagatgatacagtgtggattacactgtaccttgggcgggagagtttgttcttgatatggaattcatatgcttttgaattgcactaataactcagcattaacaagtatattactccttaaattatacatgcattttcaatattcctaaccaaatagtttatagcttattgagaagaagtctgttcttggagagatgttgaaattagatgtttattaaactttaaaatataatgccttaagctgtggcactttaaaaacatctttatatataaattgctaaaaggactgttaatgcttttctcagacacattggcattttacaattttgcacatggtttatttgaaatcaaaaaataactatactttgttttataagtctacctaatatctcatttttgattctcatcgttagcacagttttgttgcttttattaaactattttaaaaaaaaaa

SEQ ID NO: 6861 - DNA, 2269 bp, Homo Sapiens
  NM_183228
gcaggagcacgtggagaggccgagtagccacagcggcagctccagcccggcccggcagcgacatggaagatatacaaacaaatgcggaactgaaaagcactcaggagcagtctgtgcccgcagaaagtgcagcggttttgaatgactacagtttaaccaaatctcatgaaatggaaaatgtggacagtggagaaggcccagccaatgaagatgaagacataggagatgattcaatgaaagtgaaagatgaatacagtgaaagagatgagaatgttttaaagtcagaacccatgggaaatgcagaagagcctgaaatcccttacagctattcaagagaatataatgaatatgaaaacattaagttggagagacatgttgtctcattcgatagtagcaggccaaccagtggaaagatgaactgcgatgtgtgtggattatcctgcatcagcttcaatgtcttaatggttcataagcgaagccatactgtggagaaaccctacaaatgtgagttttgtggaaggagttacaagcagagaagttcccttgaggagcacaaggagcgctgccgtacatttcttcagagcactgacccaggggacactgcaagtgcggaggcaagacacatcaaagcagagatgggaagtgaaagagctctcgtactggacagattagcaagcaatgtggcaaaacgaaaaagctcaatgcctcagaaattcattggtgagaagcgccactgctttgatgtcaactataattcaagttacatgtatgagaaagagagtgagctcatacagacccgcatgatggaccaagccatcaataacgccatcagctatcttggcgccgaagccctgcgccccttggtccagacaccgcctgctcccacctcggagatggttccagttatcagcagcatgtatcccatagccctcacccgggctgagatgtcaaacggtgcccctcaagagctggaaaagaaaagcatccaccttccagagaagagcgtgccttctgagagaggcctctctcccaacaatagtggccacgactccacggacactgacagcaaccatgaagaacgccagaatcacatctatcagcaaaatcacatggtcctgtctcgggcccgcaatgggatgccacttctgaaggaggttccccgctcttacgaactcctcaagcccccgcccatctgcccaagagactccgtcaaagtgatcaacaaggaaggggaggtgatggatgtgtatcggtgtgaccactgccgcgtcctcttcctggactatgtgatgttcacgattcacatgggctgccacggcttccgtgaccctttcgagtgtaacatgtgtggatatcgaagccatgatcggtatgagttctcgtctcacatagccagaggagaacacagagccctgctgaagtgaatatctggtctcagggattgctcctatgtattcagcatcgtttctaaaaaccaatgacctcgcctaacagattgctctcaaaacatactcagttccaaacttcttttcataccatttttagctgtgttcacaggggtagccagggaaacactgtcttccttcagaaattattcgcaggtctagcatattattacttttgtgaaacctttgttttcccatcagggacttgaattttatggaatttaaaagccaaaaaggtatttggtcattatcttctacagcagtggaatgagtggtcccggagatgtgctatatgaaacattctttctgagatatatcaaccacacgtggaaaagcctttcagtcatacatgcaaatccacaaagaggaagagctgaccagctgaccttgctgggaagcctcacccttctgcccttcacaggctgaagggttaagatctaatctccctaatctaaatgacagtctaagagtaagtaaaagaacagccataaaataagtatctgttacgagtaactgaagaccccattctccaagcatcagatccatttcctatcacaacatttttaaaaaatgtcatctgatggcacttctgcttctgtcctttaccttcccatctccagtgaaaagctgagctgctttgggctaaaccagttgtctatagaagaaaatctatgccagaagaactcatggttttaaatatagaccatcatcgaaactccagaaatttatccactgtggatgatgacatcgctttcctttggtcaaggttggcagagcaagggtataaagggggaaattgtttggcagcaccaacagaaaacaaa

SEQ ID NO: 6862 - DNA, 2812 bp, Homo Sapiens
  NM_183234
agacaaaaagtaaccttcctgaagaggacatgtgattggaagttgtcaattgttgaagcattggtaactccagtctctaacgttttagaaaatcataacaagcggttctctaccctgtaaagaacagaaacctggaaatctaaggctcaaagacatccaagtaattggtatctgggagatttgggattcaaacccagctctgcttgacttggtgaactactgagttcttcattatgtctgatggagattatgattacctcatcaagtttttagctttgggagactctggtgtagggaagaccagtgtactttaccaatatacagatggtaaatttaactccaaatttatcacaacagtgggcattgatttcagggaaaaaagagtggtgtacagagccagtgggccggatggagccactggcagaggccagagaatccacctgcagttatgggacacagcagggcaggagaggtttcgtagcttaacgacagcgttcttcagagatgctatgggttttcttctactttttgatctgacaaatgagcaaagtttcctcaatgtcagaaactggataagccagctacagatgcatgcatattgtgaaaacccagatatagtgctgtgtggaaacaagagtgatctggaggaccagagagtagtgaaagaggaggaagccatagcactcgcagagaaatatggaatcccctactttgaaactagtgctgccaatgggacaaacataagccaagcaattgagatgcttctggacctgataatgaagcgaatggaacggtgtgtggacaagtcctggattcctgaaggagtggtgcgatcaaatggtcatgcctctacggatcagttaagtgaagaaaaggagaaaggggcatgtggctgttgagaagtcaagtaagcgacatagtagttcaggtggcccatgcctgggatcttctctatgattgatacatggcacagtgagagattaatgggcattgtgtacaaattgcttctcaccatccccattagacctacgaataaagcatccggttctaaaattaatttgttgcagctttgtaaatatttctttaagattcagcctgagagttaggagaaatatttcagagccaaaagtgccttatacaaccttagcctattatagtaaatcattcaaggattcagaattttgcagtcacagaagagtgtatttattatgtagaatgaatgagggtactgtcacctgccttaatgtaggtaggcccagagtcttacatttaagatcttacatgcagttataaaaccgccacagtcttcaatccagatttgaagactcatgccataggtgacattctaaaataccattaaagccacttaaatgttaaataagaatatacatgcacatcagctcaatgtctttgagtattaattttatgtaagcattctatttaacatgaatataggacaaatcatggctatatctatagaccttggataaactggattgaccaattatacactcacggtgacttttttattggtgggaaggggattggggtggggcaggctggcttaatgtaatatgagcaaccaaagtgggacttctgtctccccgctatattcccattgctctgaatggttgattgaagggtcagggaactagattttatggctttagttcactgtgattgtacatttatacttggcctatgtgctggccgcacctgaacatagctggtgcttatgccgagttatttgcgatgagtaaatatttagtttctttttcttcatatttataatgttgatctggcatcctcaggctgcagctttattagcttataacttactcatctctatctttaccagcaggctctgtattgttgatatttgcaacttgttttgcttttccattggtggaattgaaataattagtttttaattacataagatgcctgtttgctatttggtggaagatagatgttcatattgaagcagtcacatttgtactgtagttcaataaaagaaaaatgaagtattctgtagcctatatttttcatagagctcatgagcatttactgtacttgctgggtcttgccaagatcatttattccgctgcattgccaaagtgtcttcataccaaattaaaggtggttttaatatatgtttcatggaagttgtttataaaattcaaaggtatttcatttaggtgaaaagtcttatttattaaagtggtttgaataaagtagatcaaaacttccagagatcttaatggctatataggaagaaatatcactcaccataatttaaataaagaataaaaatacttgtattttgtggtggcaaatgtttggtagaactgtaattagaaaaatacaagtatatttgcgtgatggttacactagaagcccagactttacgactacacaatatattcatgtatctaaactgtacttgtaccccctaaatttatttttaaaaaaggaaaaataaaagtatcatgaaaaaacctatttttttttccactgtccttccactactcccataacaaacttatccatggttggtaaaattttacatatttctatccttgaaatgaaggcttcttttaaattccaaagaagtcatggaggcctgtgcatttgaattgtatatgctagtgaggaaaagatttagacatttcaagagcagggttggccaggcgcggtggctcacacctgtaatcccagcactttgggaggccgaggagggcggatcacgaggtcaggagatcgagaccatcctggctaacacagtgaaaccccatctctactaaaaaaaaaa

SEQ ID NO: 6863 - DNA, 2809 bp, Homo Sapiens
  NM_183235
cgccaacgacccaaaaaaggccggcggcgggtggacgcggcgcgcgaggacccgagccaggcggggacaggacggcggggcgagccagacaaaaagtaaccttcctgaagaggacatgtgattggaagttgtcaattgttgaagcattggtaactccagtctctaacgttttagaaaatcataacaagcggttctctaccctgtaaaggtgaactactgagttcttcattatgtctgatggagattatgattacctcatcaagtttttagctttgggagactctggtgtagggaagaccagtgtactttaccaatatacagatggtaaatttaactccaaatttatcacaacagtgggcattgatttcagggaaaaaagagtggtgtacagagccagtgggccggatggagccactggcagaggccagagaatccacctgcagttatgggacacagcagggcaggagaggtttcgtagcttaacgacagcgttcttcagagatgctatgggttttcttctactttttgatctgacaaatgagcaaagtttcctcaatgtcagaaactggataagccagctacagatgcatgcatattgtgaaaacccagatatagtgctgtgtggaaacaagagtgatctggaggaccagagagtagtgaaagaggaggaagccatagcactcgcagagaaatatggaatcccctactttgaaactagtgctgccaatgggacaaacataagccaagcaattgagatgcttctggacctgataatgaagcgaatggaacggtgtgtggacaagtcctggattcctgaaggagtggtgcgatcaaatggtcatgcctctacggatcagttaagtgaagaaaaggagaaaggggcatgtggctgttgagaagtcaagtaagcgacatagtagttcaggtggcccatgcctgggatcttctctatgattgatacatggcacagtgagagattaatgggcattgtgtacaaattgcttctcaccatccccattagacctacgaataaagcatccggttctaaaattaatttgttgcagctttgtaaatatttctttaagattcagcctgagagttaggagaaatatttcagagccaaaagtgccttatacaaccttagcctattatagtaaatcattcaaggattcagaattttgcagtcacagaagagtgtatttattatgtagaatgaatgagggtactgtcacctgccttaatgtaggtaggcccagagtcttacatttaagatcttacatgcagttataaaaccgccacagtcttcaatccagatttgaagactcatgccataggtgacattctaaaataccattaaagccacttaaatgttaaataagaatatacatgcacatcagctcaatgtctttgagtattaattttatgtaagcattctatttaacatgaatataggacaaatcatggctatatctatagaccttggataaactggattgaccaattatacactcacggtgacttttttattggtgggaaggggattggggtggggcaggctggcttaatgtaatatgagcaaccaaagtgggacttctgtctccccgctatattcccattgctctgaatggttgattgaagggtcagggaactagattttatggctttagttcactgtgattgtacatttatacttggcctatgtgctggccgcacctgaacatagctggtgcttatgccgagttatttgcgatgagtaaatatttagtttctttttcttcatatttataatgttgatctggcatcctcaggctgcagctttattagcttataacttactcatctctatctttaccagcaggctctgtattgttgatatttgcaacttgttttgcttttccattggtggaattgaaataattagtttttaattacataagatgcctgtttgctatttggtggaagatagatgttcatattgaagcagtcacatttgtactgtagttcaataaaagaaaaatgaagtattctgtagcctatatttttcatagagctcatgagcatttactgtacttgctgggtcttgccaagatcatttattccgctgcattgccaaagtgtcttcataccaaattaaaggtggttttaatatatgtttcatggaagttgtttataaaattcaaaggtatttcatttaggtgaaaagtcttatttattaaagtggtttgaataaagtagatcaaaacttccagagatcttaatggctatataggaagaaatatcactcaccataatttaaataaagaataaaaatacttgtattttgtggtggcaaatgtttggtagaactgtaattagaaaaatacaagtatatttgcgtgatggttacactagaagcccagactttacgactacacaatatattcatgtatctaaactgtacttgtaccccctaaatttatttttaaaaaaggaaaaataaaagtatcatgaaaaaacctatttttttttccactgtccttccactactcccataacaaacttatccatggttggtaaaattttacatatttctatccttgaaatgaaggcttcttttaaattccaaagaagtcatggaggcctgtgcatttgaattgtatatgctagtgaggaaaagatttagacatttcaagagcagggttggccaggcgcggtggctcacacctgtaatcccagcactttgggaggccgaggagggcggatcacgaggtcaggagatcgagaccatcctggctaacacagtgaaaccccatctctactaaaaaaaaaa

SEQ ID NO: 6864 - DNA, 2772 bp, Homo Sapiens
  NM_183236
cacaggaagagaagtgggtttgaagcaaggttgtggagaaaagcaaaggagacaaaaagtaaccttcctgaagaggacatgtgattggaagttgtcaattgttgaagcattggtaactccagtctctaacgttttagaaaatcataacaagcggttctctaccctgtaaaggtgaactactgagttcttcattatgtctgatggagattatgattacctcatcaagtttttagctttgggagactctggtgtagggaagaccagtgtactttaccaatatacagatggtaaatttaactccaaatttatcacaacagtgggcattgatttcagggaaaaaagagtggtgtacagagccagtgggccggatggagccactggcagaggccagagaatccacctgcagttatgggacacagcagggcaggagaggtttcgtagcttaacgacagcgttcttcagagatgctatgggttttcttctactttttgatctgacaaatgagcaaagtttcctcaatgtcagaaactggataagccagctacagatgcatgcatattgtgaaaacccagatatagtgctgtgtggaaacaagagtgatctggaggaccagagagtagtgaaagaggaggaagccatagcactcgcagagaaatatggaatcccctactttgaaactagtgctgccaatgggacaaacataagccaagcaattgagatgcttctggacctgataatgaagcgaatggaacggtgtgtggacaagtcctggattcctgaaggagtggtgcgatcaaatggtcatgcctctacggatcagttaagtgaagaaaaggagaaaggggcatgtggctgttgagaagtcaagtaagcgacatagtagttcaggtggcccatgcctgggatcttctctatgattgatacatggcacagtgagagattaatgggcattgtgtacaaattgcttctcaccatccccattagacctacgaataaagcatccggttctaaaattaatttgttgcagctttgtaaatatttctttaagattcagcctgagagttaggagaaatatttcagagccaaaagtgccttatacaaccttagcctattatagtaaatcattcaaggattcagaattttgcagtcacagaagagtgtatttattatgtagaatgaatgagggtactgtcacctgccttaatgtaggtaggcccagagtcttacatttaagatcttacatgcagttataaaaccgccacagtcttcaatccagatttgaagactcatgccataggtgacattctaaaataccattaaagccacttaaatgttaaataagaatatacatgcacatcagctcaatgtctttgagtattaattttatgtaagcattctatttaacatgaatataggacaaatcatggctatatctatagaccttggataaactggattgaccaattatacactcacggtgacttttttattggtgggaaggggattggggtggggcaggctggcttaatgtaatatgagcaaccaaagtgggacttctgtctccccgctatattcccattgctctgaatggttgattgaagggtcagggaactagattttatggctttagttcactgtgattgtacatttatacttggcctatgtgctggccgcacctgaacatagctggtgcttatgccgagttatttgcgatgagtaaatatttagtttctttttcttcatatttataatgttgatctggcatcctcaggctgcagctttattagcttataacttactcatctctatctttaccagcaggctctgtattgttgatatttgcaacttgttttgcttttccattggtggaattgaaataattagtttttaattacataagatgcctgtttgctatttggtggaagatagatgttcatattgaagcagtcacatttgtactgtagttcaataaaagaaaaatgaagtattctgtagcctatatttttcatagagctcatgagcatttactgtacttgctgggtcttgccaagatcatttattccgctgcattgccaaagtgtcttcataccaaattaaaggtggttttaatatatgtttcatggaagttgtttataaaattcaaaggtatttcatttaggtgaaaagtcttatttattaaagtggtttgaataaagtagatcaaaacttccagagatcttaatggctatataggaagaaatatcactcaccataatttaaataaagaataaaaatacttgtattttgtggtggcaaatgtttggtagaactgtaattagaaaaatacaagtatatttgcgtgatggttacactagaagcccagactttacgactacacaatatattcatgtatctaaactgtacttgtaccccctaaatttatttttaaaaaaggaaaaataaaagtatcatgaaaaaacctatttttttttccactgtccttccactactcccataacaaacttatccatggttggtaaaattttacatatttctatccttgaaatgaaggcttcttttaaattccaaagaagtcatggaggcctgtgcatttgaattgtatatgctagtgaggaaaagatttagacatttcaagagcagggttggccaggcgcggtggctcacacctgtaatcccagcactttgggaggccgaggagggcggatcacgaggtcaggagatcgagaccatcctggctaacacagtgaaaccccatctctactaaaaaaaaaa

SEQ ID NO: 6865 - DNA, 2003 bp, Homo Sapiens
  NM_183237
gccggggtctaggcaccacggtggctggcggcctgcgggcggcgctgtggcccgtcgggcggctccacagagccgccctagccttccgccttccccaagccaacgtctccgccgtcggctccgcggcgccgccatggccgacgtggaagacggagaggaaacctgcgccctggcctctcactccgggagctcaggctccaagtcgggaggcgacaagatgttctccctcaagaagtggaacgcggtggccatgtggagctgggacgtggagtgcgatacgtgcgccatctgcagggtccagatgcctgtcttagatgtcaagctgaaaacaaacaagaggactgtgttgtggtctggggagaatgtaatcattccttccacaactgctgcatgtccctgtgggtgaaacagaacaatcgctgccctctctgccagcaggactgggtggtccaaagaatcggcaaatgagagtggttagaaggcttcttagcgcagttgttcagagccctggtggatcttgtaatccagtgccctacaaaggctagaacactacaggggatgaattcttcaaataggagccgatggatctgtggtcctttgggactcatcaaagccttggtttagcattttgtcagttttatcttcagaaattctctgcgattaagaagataatttattaaaggtggtccttcctacctctgtggtgtgtgtcgcgcacacagcttagaagtgctataaaaaaggaaagagctccaaattgaatcacctttataatttacccatttctatacaacaggcagtggaagcagtttcagagaactttttgcatgcttatggttgatcagttaaaaaagaatgttacagtaacaaataaagtgcagtttaaaacccaactcttactcttaatttgttcctaatacgtatttttggcagggagagggaacggtccatgaaatctttatgtgatataaggattttaagtttgggccagtgaacagggtaaataaaatttaacttttgagcatatggaattttgattgcctttaaagttactattctgtatcattgattcatcaagaaaacctagatctgcactcacctcactgttcaatcattgagtggtaaaggacagaagtattttctagttctggtcagatgatataattttttttttttttttttgtgggggtgaagtcttgctctgccacccaggctggagtgcagtggcatgatgtcaactcactgcaacctccgcctcccgggttcaagtgattctcctgcctcagcctcccgagtagctgggattacaggtgtgtgccaccacacccggctaatttttgtatttttagtagagacgggatttccccatgttggccaggctggtctcaaactcctgacctcaggtgattcgcccacctcagcctcccaaagtgctgggattacaggtgtgggccactgcacctggcccagatgatataatttaactgtgttttaggtaacatgttaatgagggaaaatgtttaccagtgtagcattggatcaaaaagtttatcacacagtgttttaataaatggtttattctgcttaccttatttgaattgtcattataattttatatgcaaccttaatttgtcaagtaaatactttcatttaatttgaaagaattcatattcatttgctctttcatttgacaataataaaatttaaggtttattacctggaaagagtgcaagaaaatactaaacaactttatcaaactgattcacactgaggggaggttattttgtaacaaataatggaccacaagttcattttgtattcttctgtagtagaggctactgatatgaatttaagaaaaaaccttagaatcttaacttttcacatctgcagatgcagtgtgccattctgaatttttcaatctaagggatgtggatacatagaatgtttaaaaagataacaattagaatgaaaaattaaaattatgtatgcttttaaaaaaaaaa

SEQ ID NO: 6866 - DNA, 6202 bp, Homo Sapiens
  NM_183238
gatcgggccgtgtccgccgcggccctgcgaggtccgagggactcattctgatgaaggaaagagcgtccctgtgcagctgcgtgtccttcagttctttggctctgattccgtgtctggcttcatctaagtggcctggtccatgggcagtgaagaaatgtaaagtgcaatagccctctggaacaagacaattcatgtgagataagaaagaagagcccacaagaccaaggatgtattctcagtttacagaccactgaccagaggccactccagggtgtcaggactaagagaagtcacaaaacagcagatttcccaagagcagcggaaaatgatccagtcacagatatcatttgaggatgtggctgtggatttcacgctggaggaatggcagctacttaatcctactcagaagaacttgtacagagatgtgatgttggagaactatagcaatctggttttcttggaagtctggctagataatcccaaaatgtggctccgagataatcaagacaaccttaaaagtatggagagaggccataaatatgatgtttttggaaaaatatttaattcaagcataaacattgttcatgtaggactgcgatcccataaatgtggcacaggagaaaaaagtttgaaatgtccttttgatttgcttattccaaaaaataattgtgaaagaaagaaaattgatgaactcaataagaaattattgttctgtatcaaacctggcagaacccatggtgggataaaatactgtgattgcagtacatgtagaaaatccagcaacgaagagccatggctcactgctaatcacataacacacacaggagtctatttatgcatggaatgtggcagattttttaacaagaagtcacaacttgttatacaccagagaactcatacaggagagaagccctatcaatgcagtgagtgtggaaaagccttttcacagaagtcactgctcacggttcatcaaagaactcactcaggagaaaaaccgcatgggtgcagcgaatgtcagaaagcttttagtaggaagtcactcctcattttacatcagagaattcatactggagagaagccgtatggatgcagtgaatgtggaaaagccttcagtaggaagtcgcagcttaaaagacatcagataacgcacacaatagagaaaccctacagttgcagtgagtgtgggaaagcattctcccagaaattaaaactcatcacacatcagagagcgcacacaggagagaaaccctatccatgtagtcactgtggaaaagccttcttttggaagtcgcagctgattactcatcagaggacccacacagggaagaaaccttacggatgtggtgagtgtcaaaaagccttcagcaggaactcacttctcattaggcatcagaggattcatacaggagagaagccctacgaatgcaacgaatgtggtgaagccttcatcagaaaaccacagctgattaaacatcagataactcacacaggagagaagaactatcgatgcagtgattgtgaggaggccttctttaagaagtcagagttaataagacatcaaaaaattcacttaggagagaaaccatatggatgcattcaatgtgggaaaaccttctttgggaagtcccagctcctaacgcatcacagaacacacactggggagaagccttatgaatgcagtgagtgtgggaaggccttcacccagaagtcaagcctgatatcacatcagagaacacatacaggtgagaaaccctatgaatgcagtgaatgcaggaaaaccttcagtgagaagtcaagtctcattcatcatcagagaacccatactggagaaaagccctttgaatgtagtgaatgtaggaaagcttttgcctggaagccacagcttcttaggcatcagagaattcatacaggggagaaaccctatgaatgcagtgaatgtgggaaagcatttgttcagaaagtgcagctcattaagcatcaaagaaatcacacaggagagaaaacctatggatgcagcgattgtgcaaaagctttctttgagaaggcacagctgattatacatcagagaattcatacaggagagagaccatataaatgtggtgaatgtgggaaatctttcacaagaaagtcacaccttatgaggcatcagaggattcatacaggagataaatactatggatgcaatgagtgtgggaccaccttcaacaggaagtcgcagcttatgatacatcagagaaatcatataatataaaaatcatgactttggcgaatgcagaaaggttgctatcaagtgtcatactttctgacacttttgaggatgcatgtgggagagaaaccctattgaggcagtgactgttgaaaaagcttgaattgaggagtcaagagtcactaagcagaatttagaaagagaagtttttaaaaagcaaacagtgtaaaaaaagtcatctcccagaagacactactcgttacatattggatgactcattgaggtgaaaaccttattagtgttgtgatagtagagaagcttttagtcaaaagtcagtttattaaatgtttagaatacctaaacaggaagaaaattctattgttttttataacaaagtggaagatttcaagaaaggacaactcactgtacacttgagaataatacctacagaggttcatactgaagagtagtctcaataatgtaaagaatttgacaagcatgatgctattgaaatagttctgtaaggaagtggtgttctttatacatcaattattacaaaaagcagtgaattgtaagtgtgaggtgtgtttacttagatgtgaagagttctccttactgctgtgatggaataacaagggtcagatttcctctcctgccttaaacaactggaagctatacaatacgtataataggtaatggtttttagacataggacaagcacaggtttgtgatcctcaggagactgcagacagagtgaggtgagcaccatggtttctcagcctgcccccgcatggcagttcctaggttgcagttcagggaagggaaacaataaatctcgctgaattgaagagacaggactggcagttggggaggccacagcagctagaatttccaggggaaagtactggagagatgggatccttctagatacagggctcaagaagtctgctgggagtcccctgagtcctttgacttagtactgacttgcactgaggccaggaaaagaagcactggaaagcagcaggctgaacaattcctggaactcatgcagggctgggaatagtttatgttctcagcagccagagtggaaacagagtggaaacacatggagcatcaggtagaattctcagaaaggttttgttttagtagtgcagctaattaactctagattaaaagctactctggacctacagtgtccggcatccaaaaaaactaatgtgttatgcaaagaagcaataaaatatgacttataaccaggagaaaaatcagtagaaacccagaaaagacagaggtgatggaattagtagacaaggatattaaaagagctattgtaaatataaagtagaggaaaacataagattgatgaaacctgaggtataagagatatttttactggccaaaatggaacttctagggatgaaatcaacttctgattttgttaaaatcccgagtggagagattagatacagaaaaagaagaaaaaatcaatgaacttgaagagtaagaataaaaactaccaaagtgatatacagagagaaaaaaagacttagagaagaggaagagaataggaaaaccattacagtagtgtaatatatgtttaactggagtcccagaaggagaggagaaaatgaagaggcatgaagaagtatttgaataaataatggctaaagattttccaaatctggtgaaaacaatacccccacatattcaagaagctcaaatgacctgaagtagaataaacataatttacatcacagcagtgcacctcagagtcacattcatgaaaagcactgataaacagaatacttttaaaacaccttgagaaaaaaagataatacatacacatgaacaaagaatggcagcatatttctggtgagaactatgcaagctataagacaatggagtattatctctaaattccttaatgaaataaacaacaaaccctgcaacctagaattctgttactgtcaaaaacgttttcaaaaatgaaggcaaaataaagactgtttctgagaaactaaatcaaaggtaattttattacctgtagacctgtctttgggaaacattaaaggatgtttgagggcagcaggaaaataatacaaaacttaagtttgggtctgtacaaaggaatgaagttctgaaaatggtgaatatgtgggtaaatataaaagatatttctctctttttaaaatctttttaaaagggaattggctgcttaaagccaaagtaatgataacgtatttggagtttatttagaagtaaagtgtgatgacgataacacttaagtgtgaatttttaaatatagttgagtagactgcatcatctgagttagaagcctattccttcagggctcggggtagcttgaatttgtagcaggcacatgacagaaattgtatgtattgtggatctgcatgtgtgctgagtattccctatttctttgatcccttttcccccattttctgctctgctcccccctgaggctgtcttctagagactggggtttcttcataggtttgaacagtgggagataccagaggtgggaggagaaaaagttatttattaccgttcccttcctcctgcctggaccatggtagcttctgtgttcccgtaaggatacagcttcctttgggaagccccatctatggctgtagatctctcggtttcagttgacaccattccctctccatgatcttcagacttaactactactgggtgcttccccaacccactggttgggtgtctttaattgtgaacacatatttgtaaatagtgcctttattaattgttcttgagttaatattctgagtgtgccatttattttctgtgccatctgttaaatgatgagcatttaataaaattgtgataatcagttatcagtacaagtgccgcatagtgcataggctgaaatgtctcaagattccccacactacatatcagtattttctatctgtatctggacaatgcagtagaaattataacaaatacaaagttctttgtgcttttctgctgcatatgtcagtggctctggagattgttaccatctgctacatatataaatagacttgcagttattactaagctcctcttcagtaatagaaagacttatgaagtcttttactacctctgggttagccaaacaaccttcaaaaagcattgttatttaggttaaatatctgtggacaagaaacaagataatcagttactgagtgaagaaagacgggaatgatgtcccatacttcccagctctctaaagtgttatgctgtacaattaaaatacccctgacccatcatctgctaccattcgttgtggataattcatgtaatctctaacctgtgggcaagtctttacccttcagtagtcaagattacgttagagacttcgtccacgaatccacaccacctttcccatcagttctcaccggaaatatgctgccaaaaagaaaatcagcttttctaagatcaagccagagttgcttctcttacaaccttacggcgctaatgcattaagttgaagtcgactgccaaagaggcccagcagagggcagcacccccatcatttttttgaatttctcccttaggaattttgccttcctttgtcttctgtccaccaggccttctctccagctggacacaaacctcctttgaagggaaataattgccgttaggcttcacagtagtgctttttcctttcacttggatttgcattttaacctgcatttcgaagatttttatacatgttttctatttccgacaatgccaggaggcttcattgacgttgtagtctgtgttaataaacttgtgtatcactctgctctgatcttttaggaattaacttgcaaatgaaatgaatatgttgggactttggcataatttgaatatagcattgtgtgagttgtgattgtctcttcctaattgtgctgtaataacctgtgtatgagaataaaatgatttccaccatcaggattctcccatgcccccctttattaaaaaaaaaaa

SEQ ID NO: 6867 - DNA, 851 bp, Homo Sapiens
  NM_183241
cgccgggttcccgctcgcccggcgccatggatccgctgtcgccgccgctctgcacgctgccgccgggccccgagccgccccgcttcgtgtgctactgcgaaggggaggaaagcggggagggggaccgcggcggcttcaacctctacgtgaccgacgccgcggagctttggagcacctgcttcacgccggacagcctggcggccctcaaagcccgttttggcctgagtgcggctgaggacatcaccccccggttcagggcagcctgtgagcagcaagctgtggctctgactctgcaggaggacagagcatccctgacgctttcaggggggccctcggcactggcctttgacctctccaaggtaccaggcccagaggcagcccccaggctgcgggcgctgacactgggcctggcaaaacgcgtgtggagcctggagcggcgactggcagctgcagaagagacagctgtcagcccgaggaagagcccccggcctgcagggcctcagctcttcttaccagacccagatccccagagaggtggccctggacctggagtcaggaggcggtgtccaggagagtcgctcatcaaccccgggttcaagagtaagaaaccagctggtggcgtggacttcgatgagacctgaaggtgcagcacaagcgtggccccgcggggagtccgcctatgaggggagaggcagtctttgaggcccccatcagagaccccccgccaccacctccacctgcctgtcctgggccaggactaacacggctcctcaaattccttccctgtcaaataaacagctcccttggttggaaaaaaaaaaaaaaaaaaaaaaaaaaaaaaaaaaaaaaaa

SEQ ID NO: 6868 - DNA, 2517 bp, Homo Sapiens
  NM_183243
actcgaccgggctgcgctcactgcccagccggggccccgggagcctccaggctcccgcccgccctgagctgcggcctccgcatggaggggccactcactccaccaccgctgcagggaggcggagccgccgctgttccggagcccggagcccggcaacacccgggacacgagacggcggcgcagcggtacagcgcccgactgctgcaggccggctacgagcccgagagcatggcggactacctgatcagcggcggcaccggctacgtgcccgaggatgggctcaccgcgcagcagctcttcgccagcgccgacggcctcacctacaacgacttcctgattctcccaggattcatagacttcatagctgatgaggtggacctgacctcagccctgacccggaagatcacgctgaagacgccactgatctcctcccccatggacactgtgacagaggctgacatggccattgccatggctctgatgggaggtattggtttcattcaccacaactgcaccccagagttccaggccaacgaggtgcggaaggtcaagaagtttgaacagggcttcatcacggaccctgtggtgctgagcccctcgcacactgtgggcgatgtgctggaggccaagatgcggcatggcttctctggcatccccatcactgagacgggcaccatgggcagcaagctggtgggcatcgtcacctcccgagacatcgactttcttgctgagaaggaccacaccaccctcctcagtgaggtgatgacgccaaggattgaactggtggtggctccagcaggtgtgacgttgaaagaggcaaatgagatcctgcagcgtagcaagaaagggaagctgcctatcgtcaatgattgcgatgagctggtggccatcatcgcccgcaccgacctgaagaagaaccgagactaccctctggcctccaaggattcccagaagcagctgctctgtggggcagctgtgggcacccgtgaggatgacaaataccgtctggacctgctcacccaggcgggcgtcgacgtcatagtcttggactcgtcccaagggaattcggtgtatcagatcgccatggtgcattacatcaaacagaagtacccccacctccaggtgattggggggaacgtggtgacagcagcccaggccaagaacctgattgatgctggtgtggacgggctgcgcgtgggcatgggctgcggctccatctgcatcacccaggaagtgatggcctgtggtcggccccagggcactgctgtgtacaaggtggctgagtatgcccggcgctttggtgtgcccatcatagccgatggcggcatccagaccgtgggacacgtggtcaaggccctggcccttggagcctccacagtgatgatgggctccctgctggccgccactacggaggcccctggcgagtacttcttctcagacggggtgcggctcaagaagtaccggggcatgggctcactggatgccatggagaagagcagcagcagccagaaacgatacttcagcgagggggataaagtgaagatcgcgcagggtgtctcgggctccatccaggacaaaggatccattcagaagttcgtgccctacctcatagcaggcatccaacacggctgccaggatatcggggcccgcagcctgtctgtccttcggtccatgatgtactcaggagagctcaagtttgagaagcggaccatgtcggcccagattgagggtggtgtccatggcctgcactcttacgaaaagcggctgtactgaggacagcggtggaggccgaggtggtggaggggatgcaccccagtgtccacttttgggcacagcctccctccataactgagtggtccacagatttgcactacgggttctccagctcctttccaggcagagaggaggggaggtcctgaggggactgctgcccctcactcggcatcccctgcagagtcaggactgctcccggggccaggctgccctgggagcccccctccgagcccagccagccaggctctcaggccctgcgcctgcctcaggtctttcttgctgcagcctgctccagcctggcccccaccccaggggcaggcggcccctcctggcttctcctgtagggcacctccctgcccctagcctcccaggaaatggtgctctcctggccctgcctctggcccttcccgggccgctgcccctcagccatgtggcacttctgagctcctgacctaggccaaggggaggtctctgcccccttccccggccctgggctacccttgggtcctgctcctcaggccgctcccctgtccctggccatgggtaggagactgccctggtcatggccgcctgcctgtcattcctgactcaccaccgtccccaggtgaaccattcctcccttctcctcagctgcagtcgaaggctttaactttgcacacttgggatcacagttgcgtcattgtgtattaaatacttggaataaatcaagcaggtctcaacgcctccactaaaaaaaaaaaaaaa

SEQ ID NO: 6869 - DNA, 3086 bp, Homo Sapiens
  NM_183359
gggtttcggcccttccagaccgtctctcctcagggttggagacttcggggccaagatggcgacgggaacgggcaaacacaagctgctaagcactggccccacagagccatggtccatccgagagaagctatgtttagcatcttctgtcatgagaagtggcgatcaaaattgggtatcagttagcagagcaatcaagccctttgcagaacctggccgccctccagactggttctctcaaaaacattgtgcttcccagtactcggagcttttagagaccactgagacaccaaaacggaaacgaggtgaaaagggagaagtggtggaaactgttgaagatgttattgttcggaaattgactgctgagcgagttgaagaactaaagaaagtgataaaggaaacccaggagagatatagacggctaaagagagatgcagaactaattcaagctggacacatggacagcagactggatgagctttgcaatgacattgaaaaagaaattggaagaagaggaggctgaagtaaagaggaaggctacagatgctgcataccaggctcgtcaagcagtaaaaacacccccccggaggttacccactgtgatggttcgctctcctatagattctgcctccccaggaggtgattatccacttggggacttgactccaaccactatggaagaggctacctctggggtaacccccgggactttgccgagtaccccagtcacctcgtttcctgggattcctgacacccttcctccaggctctgcacccttagaagcccccatgaccccagtaacagatgattcaccccagaaaaagatgcttggacagaaagcaactccacccccctcccctctgctgtcagagctcttgaagaagggcagcctcctgcctactagccccagactggtcaatgagagtgaaatggctgtggcttctggccacctgaacagtacaggtgtcctcctggaggtaggcggggtccttcccatgatacatggtggggagatacagcaaacacccaatactgttgcagcctcccctgctgcatcagagtctgtgtcccaagctaccattgtcatgatgcctgcgctgccagcaccatcctctgctccggctgtctccactactgaaagtgtagctccagtgagtcaacccgacaactgtgttcccatggaggctgtgggggatccacatactgtgactgtttccatggacagcagtgaaatatccatgatcatcaattctatcaaagaagagtgttttcgatcaggggtagcagaggctcctgttggatcaaaggctcccagcatagatgggaaggaagaattagatctggctgagaagatggatattgctgtgtcttacacaggtgaagagctggattttgagactgttggagacatcattgccatcattgaggacaaggtagatgatcatcctgaagtgctggatgtggcagcagtggaagcagcactgtcattttgtgaagaaaatgatgatcctcagtccctgcctggcccctgggagcatcctatccagcaggagcgggacaagccagtacctctccctgcaccagaaatgacggtcaagcaagagagactggactttgaggaaacggaaaacaagggaatacatgaactggtggacatcagggagcccagtgcagagatcaaggtggaacctgcagaaccagagccagtcatttcaggagccgaaatagtagctggagttgttccagccacaagtatggagccaccagaactcaggagtcaggacttagatgaggaactgggaagtactgcagctggagagattgttgaagcagatgttgccattgggaaaggcgatgagactccacttacaaatgtgaagacagaggcatcccctgaaagcatgttgtctccatcacatggctcaaatcccattgaagatcctttagaggcagagactcagcacaagtttgaaatgtcagactcattgaaagaagaatcagggactatttttggaagccagataaaggatgccccaggtgaggatgaggaggaagatggtgtcagtgaagcggccagcctagaggagcctaaggaagaggatcaaggagaaggctacttgtcagaaatggataatgaacctcctgtgagcgagagtgatgatggcttcagcatacacaatgctacactgcagtcacacacactggcagactccatccccagcagccctgcttcttcacagttctctgtctgtagtgaggatcaggaagctattcaggcacagaaaatttggaagaaagccatcatgcttgtatggagagctgcagctaatcataggtatgccaatgtcttcctgcagcctgttacagatgacatagcacctggctaccacagcattgtgcagaggcctatggatttgtcaactattaagaaaaacatagaaaatggactgatccgaagcacagctgaatttcagcgtgacattatgctgatgtttcagaatgctgtaatgtacaatagctcagaccatgatgtctatcacatggcagtggagatgcagcgagatgtcttggaacagatccagcaattcttggccacgcagttgattatgcaaacatccgagtctgggatcagtgctaaaagtcttcgagggagagattctacccgcaaacaggatgcttcagagaaggatggaggaaccaggggacgccgctgtgccattgaagcagatatgaagatgaaaaagtgaagcctcagagttaccctctttgagccgaacctaaaataaaagtaaacaagatagagcttgggcttgcgggcccagttccagaggtggaagttacagaagaggaggtacctgggccacacgacatgagctggaaaatctctcttagagagttggagtagcacaattgcctgttttagggcagaaaccatgggctatgttaatgtcctaatgtgtagctagcagatcgtagctagtttgtattgtcttgtcaattgtacagactttttaaaaaaaacaaccaccagtgaaatgtgtgtgtatacaataaactgaaaaaaaaaactaaaaaaaaaaaaaaaaaaa

SEQ ID NO: 6870 - DNA, 2685 bp, Homo Sapiens
  NM_198252
tcccgcccgcgccctgcccaccccggccgcgcgcaccacaacgcccccgccccgccgcccggaaccagctgagcgcagctggacccagcagccgctgtctccagtgccgcagcagcaggtagtgctcatagctctctttgtccagtgcttcggccttggtcccagcgccttcccacggagcagcactcttcaccctgcacagccttgttagcccaacagcatggtggtggaacaccccgagttcctcaaggcagggaaggagcctggcctgcagatctggcgtgtggagaagttcgatctggtgcccgtgcccaccaacctttatggagacttcttcacgggcgacgcctacgtcatcctgaagacagtgcagctgaggaacggaaatctgcagtatgacctccactactggctgggcaatgagtgcagccaggatgagagcggggcggccgccatctttaccgtgcagctggatgactacctgaacggccgggccgtgcagcaccgtgaggtccagggcttcgagtcggccaccttcctaggctacttcaagtctggcctgaagtacaagaaaggaggtgtggcatcaggattcaagcacgtggtacccaacgaggtggtggtgcagagactcttccaggtcaaagggcggcgtgtggtccgtgccaccgaggtacctgtgtcctgggagagcttcaacaatggcgactgcttcatcctggacctgggcaacaacatccaccagtggtgtggttccaacagcaatcggtatgaaagactgaaggccacacaggtgtccaagggcatccgggacaacgagcggagtggccgggcccgagtgcacgtgtctgaggagggcactgagcccgaggcgatgctccaggtgctgggccccaagccggctctgcctgcaggtaccgaggacaccgccaaggaggatgcggccaaccgcaagctggccaagctctacaaggtctccaatggtgcagggaccatgtccgtctccctcgtggctgatgagaaccccttcgcccagggggccctgaagtcagaggactgcttcatcctggaccacggcaaagatgggaaaatctttgtctggaaaggcaagcaggcaaacacggaggagaggaaggctgccctcaaaacagcctctgacttcatcaccaagatggactaccccaagcagactcaggtctcggtccttcctgagggcggtgagaccccactgttcaagcagttcttcaagaactggcgggacccagaccagacagatggcctgggcttgtcctacctttccagccatatcgccaacgtggagcgggtgcccttcgacgccgccaccctgcacacctccactgccatggccgcccagcacggcatggatgacgatggcacaggccagaaacagatctggagaatcgaaggttccaacaaggtgcccgtggaccctgccacatatggacagttctatggaggcgacagctacatcattctgtacaactaccgccatggtggccgccaggggcagataatctataactggcagggtgcccagtctacccaggatgaggtcgctgcatctgccatcctgactgctcagctggatgaggagctgggaggtacccctgtccagagccgtgtggtccaaggcaaggagcccgcccacctcatgagcctgtttggtgggaagcccatgatcatctacaagggcggcacctcccgcgagggcgggcagacagcccctgccagcacccgcctcttccaggtccgcgccaacagcgctggagccacccgggctgttgaggtattgcctaaggctggtgcactgaactccaacgatgcctttgttctgaaaaccccctcagccgcctacctgtgggtgggtacaggagccagcgaggcagagaagacgggggcccaggagctgctcagggtgctgcgggcccaacctgtgcaggtggcagaaggcagcgagccagatggcttctgggaggccctgggcgggaaggctgcctaccgcacatccccacggctgaaggacaagaagatggatgcccatcctcctcgcctctttgcctgctccaacaagattggacgttttgtgatcgaagaggttcctggtgagctcatgcaggaagacctggcaacggatgacgtcatgcttctggacacctgggaccaggtctttgtctgggttggaaaggattctcaagaagaagaaaagacagaagccttgacttctgctaagcggtacatcgagacggacccagccaatcgggatcggcggacgcccatcaccgtggtgaagcaaggctttgagcctccctcctttgtgggctggttccttggctgggatgatgattactggtctgtggaccccttggacagggccatggctgagctggctgcctgaggaggggcagggcccacccatgtcaccggtcagtgccttttggaactgtccttccctcaaagaggccttagagcgagcagagcagctctgctatgagtgtgtgtgtgtgtgtgtgttgtttcttttttttttttttacagtatccaaaaatagccctgcaaaaattcagagtccttgcaaaattgtctaaaatgtcagtgtttgggaaattaaatccaataaaaacattttgaagtgtgaaaaaaaaaaaaaaaaaaaaaaaaaaaaaa

SEQ ID NO: 6871 - DNA, 3240 bp, Homo Sapiens
  NM_198256
agaggggggcggtgtactgcgcatgcgggaagatggcgggccgggcgacttgagatccgcgggtctccctcctctttttccgtctgcgtcgggagctcccgggcacgtgaggccgtgccgcgtttactggcgggcgggacggcctagccgggcggcgcctcggaggaagccgcggaccccttaggtgctgggcccttggaaatcggcgcgtggggggcggtgctcgagctgagcgcgagagggcgggagagctcgtggggtgcgaggggagcaggacgcccggccgggcagcatgagtcagcagcggccggcgaggaagttacccagtctcctcctggacccgacggaggagacggttcgccgtcggtgccgagaccccatcaacgtggagggcctgctgccatcaaaaataaggattaatttagaagataatgtacaatatgtgtccatgagaaaagctctaaaagtgaagagacctcgttttgatgtatcgctggtttatttaactcgaaaatttatggatcttgtcagatctgctcccgggggtattcttgacttaaacaaggttgcaacgaaactgggagtccgaaagcggagagtgtatgacatcaccaatgtcttagatggaatcgacctcgttgaaaagaaatccaagaaccatattagatggataggatctgatcttagcaattttggagcagttccccaacaaaagaagctacaggaggaactttctgacttatcagcaatggaagatgctttggatgagttaattaaggattgtgctcagcagctgtttgagttaacagatgacaaagaaaatgaaagactagcatatgtgacctatcaagacattcatagcattcaggccttccatgaacagatcgtcattgcagttaaagctccagcagaaaccagattggatgttccagctcccagagaagactctatcacagtgcacataaggagcaccaacggacctatcgatgtctatttgtgtgaagtggagcagggtcagaccagtaacaaaaggtctgaaggtgtcgggacctcttcatctgagagcactcatccagaaggccctgaggaagaagaaaatcctcagcaaagtgaagaattgcttgaagtaagcaactgatggcatttgagaatttatgtatcactgagttttttgggaatatcttcgtggagaattacgcatcaaatttgattctcagagcaataaattatccatgaagtgctctcgttctcagtagcggcatcatggccagtagtgtctttgaggagttcaccacttagattactgagtaattgtggtttccacatttgaaaacaactccttttataattattcactgctttttgtcagtgaaatagacatcttgcctcctgaagtagcttcatcacagagtgtcatgaagacagacagtcaggctgaaatggacagttctttgtggactctacccttcccttcaaggagtatgtcatatatcacaaaagaaattgccttacactggttcatgtttgcagttactgttgtacattgcatagatgtacacacgaatttaaatgtgatgtctttgtatatatctgtataatgttgagattacttacgaaatatgtctgagtgacacttttcacccttgtacagccaaaataatgtatatatggaaagtgacagacaaattctctaatctctttggtacctataacttattagaatcctctggatgagggttagaagagactttttccaaacttctacatgtagaagtatcataaatgtgctacacatttatgtttgtggatttaattaaagtattttaatatggttttcagtgctaaaattggagtcagatacttcttggttttaagctgtctacctaattgctgtctcccagcagactggtggcatgcccagtggctttgggggcaaggatagaaatgccatcaggaaatagctgaattcattgtgaaacatgaattcagtcatggtgataattggaaactcctttcaggtttttgcaagtagattttgtaatgtttgtgtatgcagccttgctgttgagtcagtccaaggggttttacttaggacaagttgtaccttgccctctctccagctctgctcccacattttcacatacctagctgtttctacctcattgggtaagtcatttaccactctgtgcctcagtttactctgtagtttaccattagactgtgagctccttgagggactttgtcataatcactgttacatcccagtgcctcacaccatgcctggcccttaagaagtgctcaataaatgtctgaacaaataagtgagtggagtgagtgaattgtaagatcagaataataatatttggtttgtctatcgtacaagattcctgtatcgtttgaatattgcttttaaagaaatatttgaagcgacttcaaattcagactgtgtttaaaaagatttaaaatcggaatccaaaatcaaagtattaaaaaataatgctgagtgtttaggattcacatacctctgagctctggtggcttttgccagtcctgtccctctgctgagcaccagcccttcctgcagcagtcctgccggtgtgtttctgtgcacctggggatgaagtgtgctcctcccccagcggttagcctcaatgcttttcctccctctgttttattatttgaaattagccaaagaaaagctgcagggggcactgctgatcatcactggactggtgggtcgtactgtttgacagaatagggaatacaggaggaggagcaagcctagggtaaaacttaggtttgggacatgcttgatgaaagcaagagttgagcaggttgttgtgtgtatgtaggtcaggtgctcagcggaaaagtctgagctgtgtagtacgtcaggcagatgtcagtttagatgcgatagtttaagccacaagagtaggagaggtcatctaaagagtacagcaggcctaagggcatctatatttaaggagaaatacagaagaagtctcctgagaaggaataatggggcgggtggggagggagaaggcagtgtcccaaaaaccaacaaaggttttaccaaaggtaataccatcatttctgagcagcagttccttaacttgtgaatgtggcaaatgttctcctttacaaattgttctgaaggtaaaatgagatcatgtaaacgaaaatcctttgtaaattacagatgtgtgttataaatgaagtatctctcgagtcactcca

SEQ ID NO: 6872 - DNA, 8776 bp, Homo Sapiens
  NM_198270
ggtggcgacggcgagcacagaaacgatggagttgagccagtcgaccctggttggaagcaagtgagaagagaccaggcgcacccctaaatttctgtgcggagcgcttgtcatcctccccagggaacggtgcacccaaaggaggactggctggactgatttgctagggagagggcggggaagaggaggcaaggtgagcagagaagccccctgcgtatccggactgccagatcgcgcttttgccggactcctgccccctccctgctcaggtgggcgcgcccggtctccagctcacaggggcgcttggaggagaccagaaagtcgccgcctggctgcgcgggatgcctttcgccaagcggatcgtggagccgcaatggctgtgcaggcagcggcgccctgcgcccggcccagcagtggacgcgagcggaggcagcgctgagccgccgccgcccttgcagccgccgggccggagggacctggacgaggtcgaggcgccagggccagaggagccagcccgcgccgtccctgcaccttcagggctgccaccgccgccgccgccactgcccgcgccggccgaccagactcagccgccgcacggagaggcgtccgtggctggcgaggagagcacggcggggatcccggaggcggcgcccgcagccggcgaggcgtcctcggcggcggcggcggcggccgtgctgctcatgctggacctatgcgcggtcagcaacgccgctctggcccgtgtcctccggcagctctcggacgtggcccggcacgcttgcagcctcttccaggagctcgagagcgacatccagctcacccaccgccgcgtctgggcgctgcagggcaagctcggcggcgtgcagcgcgtcctcagcacgcttgaccctaagcaggaggcagtgcccgtctccaacctggacatagagagtaagctgagtgtgtactaccgcgccccgtggcaccagcagcgcaacatcttcctcccagccacaaggccaccctgcgtggaggagctgcaccgccacgcccggcagagcctgcaagccctgcgcagagaacaccggagccggagcgatcgccgagagcaaagagcagctgcccccctttccattgcagctcctccactgccagcctaccctccagctcacagccagaggaggcgtgagtttaaggaccgtcactttttaacgtcccatcccccagaggatgaagatacagatgtcatgttagggcagaggccgaaaaacccaatacacaatatcccttccacactggacaagcagaccaactggagcaaagcactacctctcccgacgccagaggagaagatgaaacaagatgcccaagtgatttcttcttgcattattcccatcaatgttactggagttggctttgacagagaggctagtatacgctgctctctggttcattcacaatcggtactacagcggagacgaaaattgaggaggaggaaaaccatctcgggtatccccagaagagttcaacaagaaatagattctgatgaatcaccagtggccagggaaaggaatgtgattgtgcacacaaacccagacccctccaacactgtcaataggatatccggaaccagggactctgagtgccaaaccgaggatattctgattgctgccccatccagaaggagaatcagagctcaaaggggtcaaagcattgcagcttccctttctcattctgctggcaacatttctgccctagcagacaaaggtgacaccatgtttactcctgcagtgagcagccgcacaagatctcggagccttccccgggaaggtaatagaggtggggatgctgagcccaaagttggcgctaaaccctcagcatatgaagagggagagtcttttgtgggtgaccatgaaagaacccctaatgatttcagtgaggctccaagcagcccgagtgcccaggaccaccagcctactttgggcctggcctgctctcaacatcttcacagcccccagcacaaattaagtgagaggggaaggtcacgtctgtcccgaatggctgctgactctggcagctgtgacatctcctccaactcagacacgtttgggagccccatccactgcatctccacggctggcgtcctccttagcagccacatggaccagaaagatgaccaccagtcatccagtggcaactggagtgggagcagctccacgtgcccctcgcagacctcagaaaccatccctcctgcagcttctcctccactcactggctcttcacactgtgactcggagttgtcactaaacacagcccctcatgccaatgaggatgccagtgttttcgtgacagagcaatacaatgaccacttggataaagtgagaggccatcgggcaaactcctttacctccactgttgcagacctgctggatgatcccaacaacagcaacacaagtgacagtgagtggaattacctacaccaccaccatgatgcctcctgccgccaggattttagtcctgagcgtcccaaggcagacagcctgggctgcccaagcttcacaagcatggccacttatgacagctttctggaaaagtctccatcagacaaagcggacactagctctcacttttcagtagacacggaaggatactatacctccatgcactttgactgtggtctcaaaggtaataagagctatgtctgtcactatgcagccctgggcccagagaatggccagggtgtaggggcttcccctggtcttccagattgtgcctggcaggactacttagaccacaagaggcagggaagaccaagcatctctttcaggaaaccaaaggcaaagccgaccccacctaaacgtagctcatcattgaggaagtctgatggaaacgcagatatttctgagaagaaagaaccaaagataagcagtggtcagcacctgcctcacagttccagggaaatgaagctgcctcttgatttcgccaacacgccttctcgaatggaaaacgccaatcttcccaccaagcaggaaccttcttggataaaccagagtgaacaaggcattaaggaacctcagttagatgcttcggatattccaccattcaaagatgaagttgccgaatccacacactatgcagacctctggctcctaaatgacttgaaaacaaatgatccttatagatctctatctaattcaagcaccgctacgggtaccacagtcattgaatgcatcaaatctccagagagctctgaatcccaaacatcacaatcagaatcaagagccaccaccccatctcttccttctgttgacaatgagtttaaactggcttcaccagaaaagctggctggcttggcatctccatcaagtggctattcaagccagtctgaaacgccaacatcctctttccctacagctttcttttcaggtccattgtctcccggaggtagcaaaagaaaacctaaagtcccagaaagaaaatcctcactacagcaaccctctttaaaagatggaactatatcactgagtaaagaccttgaacttccaattatacctcctacccatcttgatctaagtgctcttcataatgtcttgaacaaaccattccaccaccgtcatccactgcatgtttttactcataataagcagaacacagtaggagaaacactgaggtcgaatcctccaccgtcccttgcaattacaccaacgatcctgaaatctgttaaccttaggtccatcaacaagtctgaagaagttaagcaaaaagaagaaaacaatacagatctcccttatttagaggaaagcacactcacaacggctgccttgtctccaagtaagattaggccgcatacagcaaataaatcagtatctcgtcaatactccactgaagacaccatactgtcctttttagactcttctgcagttgagatgggaccagataaactacatttagaaaaaaactctacttttgatgtgaagaatcgctgcgatccagaaaccataacatcagctggtagcagtcttctagattcaaatgtcacaaaagaccaagtgcgtacagagactgagcctattccagaaaacacgccaaccaaaaactgtgcttttcccacagaaggatttcagagggtctctgctgcccgcccaaatgatttggatggtaaaataatacaatatggacctggtccagacgaaactctagaacaggtacagaaggcaccctctgcaggtctggaggaagttgcacaacctgaatctgtggatgtaatcacatctcagtcagactcaccaactagagcaacagatgtaagcaatcaatttaagcatcaatttgttatgagccgccaccatgacaaagtgcctggtactatcagctatgaatcggagataacatctgtaaattcattccctgaaaaatgttccaagcaggaaaatattgcttcaggtatttcagccaaaagtgcctctgataacagcaaagcagaggagacccaaggaaatgtggatgaggcttcattgaaagaatcatcaccgagtgatgactccatcatttcaccacttagtgaagactcccaagctgaagcagagggtgtgttcgtgtctccaaacaaacctcgaacaactgaggatttatttgcagtcattcacagatccaagaggaaagtacttggaagaaaagattccggggacatgtctgttcgaagcaaatcgagagctcccctcagcagtagcagcagcagcgccagttccatcacttcacccagcagtaatgtgacaacccccaacagccagaggtctcctggtctcatataccgaaatgccaaaaagtccaacacatccaatgaagagtttaagctgttactgctcaagaaaggcagtcgctcagattctagttaccgcatgtctgccactgagatcctgaagagccccatactgcccaaacctcctggggagctcacagcagagtcccctcagagcaccgatgatgcccatcaggggtcacaaggggctgaggcattgtccccactctctccatgctccccacgagttaatgcagaaggcttttcctcgaagagctttgccacctcagcatcagcaagggttggacgttctcgggcccctcctgcagccagcagcagccgctacagtgtccgctgccggctgtacaatacgcccatgcaggcaatctccgagggagagacggaaaattctgacgggagcccacatgacgaccgttcctcccagagttcaacatagactgcctgtaccaggctgcctggcaaaggccaaaacccttactcacatgaggatggaggaacagaacagaggacttgggaaaagtctcaacttgatggggtagcatcactgctaagcaatgaatgaatttctaaatacagtatgtgctgggtaaacagaaagtggtttagacattcttgattagtttccatattttaagtagctgcagtctttcatgtttttctttagcatagtttgatttacgcaatctccttccttgtgaaaatagaggatacaaaattgtctaattttcatgacacctagaaaacgttttcccagagctgcctattcagaaactaaagccctcactgtcattattctttaagaagatgaaattactctggatgtttggtatttttttacattaaaacaaactaaagcaaaatttagaagaaagaactacacatatgtaaataccatatttttgataaaaatgtgtaaatagatttatcaatgatgagtggacatgtggtcaattatctactgcacaccaactgtttatagaatacacaaaaataaaatgtaataactgtattctgtgaataccattttcatatcaaatgccatatttaaatgtccaccaatatgatttctgagtggtaaacctcaaatatgaattttaaactggtgaactaaaggaaatcttgaggtcatatactgaaatatgaataaattaaaataatgaattcagatctaatcatttttatgacaaattgcagcaccaaacaaactaatagcaacccatggctgtgatttgttgtgtggtaatttggacagaatgaaaagcatgcttttgattttttttttaatcagtgagagaagtcatcattctcaacacaaagccctgaacaacagcatttgacagtgtcctttagattttaattttttcaatggattgctttaaagagaatgagtagggaaaatagtagttaattttaggttatgttttatattaggctactggggacataaacggtcataactaatgactgtaatcattaaactccttaaacagtttagaaattagctccaggttcttaaactaacaaaaataaaacctaagcatgccacagagctattgattaatcagtaagtacctgtaatgagttttcagtgaagctttctctctgtgctgatgagattcatgctacctaaaaattaacagaaatgacactgtgaacaatgtagttggaaaataggtatgtgtatatgcattatttatactcattgttaaactgggaatggggaacagctctggttcacaatactacatacaactgagtttttgtctggttttactatagtgtctgcttgatggcaaaaggggagggtggagggtgggagaggaaatgtcagggcatgtgctctgataaaataaaggcagggaaacaagctgaattacttgaaattacttgaattttcttgtcttaaaactgaaaaaaaaatgtagttacacgttaaaatctgcaaatggtttttacacctctgattttaacatgaacttatactaatgtttggaatcttatgtcagaaatataagcagctatgtacttagaataggttttgaatgggagaggtagaacagagagagaattaagaagggatctgacttataaaagactagaatgtgattagagtgatagaacataccaatgttaccaagaaattgacaagctgctggctttaagcttatgcaagtggtagttgggaaagtaggaggtgtggaagagggtttgcattttggattaattcatgcaaaatgaaggaggaagcctggtctaagaagatactgtctttcaatagaaatgatttctaaactgctacagattaagaatagataatctgattgctgttgttttgtttgtttggaaagaaaaaaaatgtctggcttcttctactatttgttttcactaccaaactgtgttactaaatttcttgtcatccttgtatgtaaaatgggtgctgggggtggaggggtataagaggagggagagtcagagagagtgtgtatgggtgtgtgtgagtgtgagtgtgtgtgtacgcacacacactggggatagataagctacctggtaaagggtttgaacatttacaaaatgtcacactttttcttaaaagaaaaatattttggggtttgaataaaatggaccaccatttctcattggaacccattaattaagaaaaccagcatggtttgacaccacatgggaacatgaataaatctgtctcatgatttgaaaagtacaccttgcaaagttttaaaaataaagtttttaggcaaatgcgataagaaaccgtcatttccagtcacagtaggcgatctttcgtaatttcataaaagcagttcgtttgcagtatggcttttgtgtagttaggggttttttaagtgtgaagaaaggtatgtgggctttaaaagtgattctaaatcttgaatagaaaacacatgaattggctttaataaaaatgtcacctttttattattgacattaagtaatggtaccatatattttttaaaatacatattgacttgaattgtgaggcaataagataccttctatatgtaatgatcacagaactaacccttataatatagttttacttattttgtttactctaaaaatctatagcagagtttctctattttatatttcatagatttaaaaaacccaaataaagatggatttaaaattcactgtggaaaagagtattgagttacaaactgagaagaaaaagcaggaagttccctaataatctggaatattctacatggcttgattacatagcaaacaagaccaagatttagggctgtcttaaacatcactgccgtcttgaagcagggtacacacgttaggtattgtgaagaacatcaatccgaacttttcttctgttgtttgcactgatgcgattttttgttcttttatgtttatacaacgtatctatgttgtgtaggggaaattttttcattttttaaaaattctactttggttttgttgttgttttgatttgtttttggctaagtagaggacatggactagttgtagcaaacagaacatgctgtttgctcttgccaaaggtcagtgagtgagtgcatttgctgcagtggtggcacgtagagaactagatggtaataaagatttaaaactatgaagaaggttacagtgtaactattttggtactagaaccagttcatgctggccgaaacgacaatggtttatggacttgcatccattttgtatttttgtaatatttgtaaatatgaactttttaaattgctgcaaagatggtttcttttgtaagatgttttcaacgtttacattcaatccaagcctttgtatattttagagctgtgcaacactttaagtcttgtatttatttttagtaaaaatggtgacagtttcattgtgaacccctctcaaaaaaaatgtatcagaaaagtttgattacctagaaagtgtgtatagaaactgcaaataaacgtgactgcaattaaaaaaaaaaaaaaaaaa

SEQ ID NO: 6873 - DNA, 2191 bp, Homo Sapiens
  NM_198282
gttcatttttcactcctccctcctaggtcacacttttcagaaaaagaatctgcatcctggaaaccagaagaaaaatatgagacggggaatcatcgtgtgatgtgtgtgctgcctttggctgagtgtgtggagtcctgctcaggtgttaggtacagtgtgtttgatcgtggtggcttgaggggaacccgctgttcagagctgtgactgcggctgcactcagagaagctgcccttggctgctcgtagcgccgggccttctctcctcgtcatcatccagagcagccagtgtccgggaggcagaagatgccccactccagcctgcatccatccatcccgtgtcccaggggtcacggggcccagaaggcagccttggttctgctgagtgcctgcctggtgaccctttgggggctaggagagccaccagagcacactctccggtacctggtgctccacctagcctccctgcagctgggactgctgttaaacggggtctgcagcctggctgaggagctgcgccacatccactccaggtaccggggcagctactggaggactgtgcgggcctgcctgggctgccccctccgccgtggggccctgttgctgctgtccatctatttctactactccctcccaaatgcggtcggcccgcccttcacttggatgcttgccctcctgggcctctcgcaggcactgaacatcctcctgggcctcaagggcctggccccagctgagatctctgcagtgtgtgaaaaagggaatttcaacgtggcccatgggctggcatggtcatattacatcggatatctgcggctgatcctgccagagctccaggcccggattcgaacttacaatcagcattacaacaacctgctacggggtgcagtgagccagcggctgtatattctcctcccattggactgtggggtgcctgataacctgagtatggctgaccccaacattcgcttcctggataaactgccccagcagaccggtgaccatgctggcatcaaggatcgggtttacagcaacagcatctatgagcttctggagaacgggcagcgggcgggcacctgtgtcctggagtacgccacccccttgcagactttgtttgccatgtcacaatacagtcaagctggctttagccgggaggataggcttgagcaggccaaactcttctgccggacacttgaggacatcctggcagatgcccctgagtctcagaacaactgccgcctcattgcctaccaggaacctgcagatgacagcagcttctcgctgtcccaggaggttctccggcacctgcggcaggaggaaaaggaagaggttactgtgggcagcttgaagacctcagcggtgcccagtacctccacgatgtcccaagagcctgagctcctcatcagtggaatggaaaagcccctccctctccgcacggatttctcttgagacccagggtcaccaggccagagcctccagtggtctccaagcctctggactgggggctctcttcagtggctgaatgtccagcagagctatttccttccacagggggccttgcagggaagggtccaggacttgacatcttaagatgcgtcttgtccccttgggccagtcatttcccctctctgagcctcggtgtcttcaacctgtgaaatgggatcataatcactgccttacctccctcacggttgttgtgaggactgagtgtgtggaagtttttcataaactttggatgctagtgtacttagggggtgtgccaggtgtctttcatggggccttccagacccactccccacccttctccccttcctttgcccggggacgccgaactctctcaatggtatcaacaggctccttcgccctctggctcctggtcatgttccattattggggagccccagcagaagaatggagaggaggaggaggctgagtttggggtattgaatcccccggctcccaccctgcagcatcaaggttgctatggactctcctgccgggcaactcttgcgtaatcatgactatctctaggattctggcaccacttccttccctggccccttaagcctagctgtgtatcggcacccccaccccactagagtactccctctcacttgcggtttccttatactccacccctttctcaacggtccttttttaaagcacatctcagattacccaaaaaaaaaaaaaaaaaa

SEQ ID NO: 6874 - DNA, 2056 bp, Homo Sapiens
  NM_198285
accgtattgttccgcgctcggccggggagggcgcggggcgctcggcttcccgtgttcctctccccgccccagccccgtgggcgcgagaggaggcggggggctccttgtgcaccagagacgcagctgccttgttcgcccggtggggtgtggatcctccgagcggtgctgggaagggggttctctctgcccgcgcgcccaggactctacccagggcggaggtcccgagtgggccgccccccgcagcgccctgggttcgcgggcccagaggctggaggcagcggggagctagggtccttcaccctcccctcgccgcgtgcctccgcaggagtcgggctccccgttccccgcgatggccgcgggccgcagtcgtacggagccgccgcgcggaccccggggcgcccctccctagcggggcgcagctccttcttgttccccgccctgccagcgggatggggggcggcgggtcggccctgagggtctgcgccgaccaccgcgggggcatcaactggctgagcctgagccccgacgggcagcgcctgctgacgggcagcgaggacggcacggcccggctctggagcaccgcggacggccagtgctgcgcgctcctgcaaggacatgaaagctatgtgaccttctgccagctggaggatgaggctgccttcacatgcagcgccgactgcaccatcaggaggtgggacgtgctgaccgggcagtgtctgcaggtgtaccgaggacacacgtccatcgtgaacaggatcctggttgccaacaaccagctcttcagcagctcctatgaccggacagctcgggtctggagtgtggacaaggggcagatgtcccgggagttccggggccaccgcaactgcgtgctgaccctagcctactctgccccgtgggacctccccagcactccctgcgcggaggaggccgcggccggggggcttctggtgaccggcagcacagatggcacagccaaggtgtggcaggtggccagcggctgctgccaccagacgctgcggggccacacgggtgcagtgctgtgcctagtgctagacacgcccggccacacggccttcacaggcagcaccgacgccaccatccgtgcctgggacatcctgagtggggagcagctgcgggtgttccgggagcaccggggctccgtcatctgtctggagctggtgaaccgactcgtgtactctggcagcgcggacaggaccgtcaagtgctggctggcagacacaggggagtgtgtgcgcacgttcacggcccacagacgcaacgtgagcgccctcaagtaccacgcgggcaccttgttcacgggcagcggggacgcttgcgcccgggccttcgacgcgcagtctggagagctgcggagggtgttccggggccacacattcatcatcaactgcatccaggtgcacggccaggtgctctacaccgcctcgcacgacggcgccctgcgcctctgggacgtgcgcgggctccgaggtgccccgcggccccctccgcccatgcgcagcctctcgcggctcttcagcaacaaggtgggctgcgccgccgcgcccctgcagccggcctgatcccgcggggcccctgcagacgccagcccagacacccagcggctcccagagcgccccgccctgctacccgcggtggtggcgcccgatggccggcgaggggcgaggagcgaggaagcccgggcgggaggagagcccgtcgcaggcgtctggtttttctttggtggccaggaggcgctgggagcgggagtgctcgccctggggaccgcccccttttcccttttagggtggctcctgtcctccctccccatccctgacctggcgaaaggcctagtcctggggaccctcccacctcaggggctgcaggcggactgccccagctcccccagccccacgaaactgggcctttcctgctgagaggaagtgactttttacagaagccactgaacctggttattttggcaaatcgtccgtctcgagggccttggggggaactgaaatatacagcctgaacgttaaaagtgaaaaaaaaaaaaaaa

SEQ ID NO: 6875 - DNA, 1874 bp, Homo Sapiens
  NM_198315
cggttctttccggaaattatgactgcagctgttttcactccgctgtgactcagagcgctccgggctgcaggagaggaagaaatcttgcatcaccatggtgcacttctgtggcctactcaccctccaccgggagccagtgccgctgaagagtatctctgtgagcgtgaacatttacgagtttgtggctggtgtgtctgcaactttgaactacgagaatgaggagaaagttcctttggaggccttctttgtgttccccatggatgaagactctgctgtttacagctttgaggccttggtggatgggaagaaaattgtagcagaattacaagacaagatgaaggcccgcaccaactatgagaaagccatctcccagggccaccaggccttcttattggagggggacagcagctccagggatgtcttctcttgcaatgtgggtaacctccaacctgggtcgaaggcggcagtcaccctgaagtatgtgcaggagctgcctctggaagcagatggggctctgcgctttgtgctcccagctgtcctgaatcctagataccagttctctgggtcgtctaaggacagttgccttaatgtgaagactcctatagtccctgtggaggacctgccctacacactcagcatggtcgccaccatagattcccagcatggcattgagaaggtccaatccaactgccccttgagtcctaccgagtacctaggagaggacaagacttctgctcaggtttccctggctgctggacacaagtttgatcgggacgtggaactcctgatttactacaatgaggtgcatacccccagcgtggttttggagatggggatgcctaacatgaagccaggtcatttgatgggagatccatctgcaatggtgagtttctatccaaatatcccagaagatcaaccatcaaatacctgtggagagtttatctttctcatggaccgctcgggaagtatgcagagccccatgagtagccaggatacatctcagctgcgaatacaggcagccaaggaaacactgattttgctgctgaagagtttacctataggctgttatttcaacatctatggatttggctcttcctatgaggcatgctttccggagagtgtgaagtacactcagcaaacaatggaggaggctctggggagagtgaagcttatgcaggccgacctagggggcactgaaatcttggcaccactccagaacatttacaggggaccctccatcccaggccaccccctacagctttttgtctttacagatggagaagttacagacacgtttagtgtaattaaagaagttaggatcaacagacagaaacacaggtaggaagaaaatgtgatttccgggtgattggtgctgagtagtgacacacagactctagtgctacatgatgccggtgttgaccttccttcaagaggaccaaatgatttcagaatttagttttagcagctgaaaatttatttctccctgtaaacgttaaaaacagttttccaaataacatcaacaacacagcaaaaccattgtttcttattctttctaaactacaacgaacacaagaattgaatagtaagatgttaattttttttactataaacatttttagagaagtaaaacatgctgaaaactacacaaattataagcatacaactggactcattatcacagtgaatgcactgtgtgatcgccacataggtaaaaactggaatggtcgtaggcctctccatctgtacccttttccatcatgtcctattccctgtcactacacactaaaactttcctgacttacaataccatgggttatttatgcttgtttttgaatgaaaataaataagttatacagtaaaaaaaaaaaaaaaaa

SEQ ID NO: 6876 - DNA, 2581 bp, Homo Sapiens
  NM_198317
agtgagcgacacagagcgggccgccaccgccgagcagccctccggcagtctccgcgtccgttaagcccgcgggtcctccgcgaatcggcggtgggtccggcagccgaatgcagccccgcagcgagcgcccggccggcaggacgcagagcccggagcacggcagcccggggcccgggcccgaggcgccgccgcctccaccgccgcagccgccggcccccgaggcagagcgcacgcggccccggcaggctcggcccgcagcccccatggagggagccgtgcagctgctgagccgcgagggccacagcgtggcccacaactccaagcggcactaccacgatgccttcgtggccatgagccgcatgcgccagcgcggcctcctgtgcgacatcgtcctgcacgtggctgccaaggagatccgtgcgcacaaagtggtgctggcctcctgcagcccctacttccacgccatgttcacaaatgagatgagcgagagccgccagacccacgtgacgctgcacgacatcgaccctcaggccttggaccagctggtgcagtttgcctacacggctgagattgtggtgggcgagggcaatgtgcagactctgctcccagccgccagtctcctgcagctgaatggcgtccgagacgcttgctgcaagtttctactgagtcagctcgacccctccaactgcctgggtatccggggctttgccgatgcgcactcctgcagcgacctgctcaaggccgcccacaggtacgtgctgcagcacttcgtggacgtggccaagaccgaggagtttatgctgctgcccctgaaacaggttctggaactggtctctagcgacagcctgaacgtgccttcagaggaggaggtctaccgagccgtcctgagctgggtgaaacacgacgtggacgcccgcaggcagcatgtcccacggctcatgaagtgtgtgcggctgcccttgctgagccgcgacttcctgctgggccacgtggatgccgagagcctggtgaggcaccaccctgactgcaaggacctcctcatcgaggccctgaagttccacctgctgcctgagcagaggggcgtcctaggcaccagccgcacacgtccccggcgctgcgagggggccgggcctgtgctttttgctgtgggcggcgggagcctgtttgccatccacggagactgtgaggcctacgacacgcgcaccgaccgctggcacgtggtggcctccatgtccacgcgccgggcccgggtgggagtggctgcggtggggaaccggctctatgctgtgggcggctatgatgggacctcagacctggctaccgtggagtcctacgaccccgtgactaacacgtggcagccggaggtgtccatgggcacaaggcgaagctgcctgggtgtggccgccttgcatggactcctgtactcggccggcggctatgacggggcctcctgcctgaacagtgctgaacgctacgaccccctgaccggaacgtggacgtccgtcgctgccatgagcacccggaggcgctatgtgcgagtggccacgcttgatgggaacctgtatgctgtgggcggctacgacagctcctcacacctggccactgtggagaagtatgagccccaggtgaacgtgtggtcgcccgtggcgtccatgctgagccgacgcagctcagcgggcgtggccgtgctggagggtgccctgtacgtggcagggggcaacgacggcaccagctgcctcaactcggtagagagatacagtccaaaggctggagcctgggaaagcgtggcgcccatgaatatccgcaggagcacgcatgacctggtggccatggacggatggttgtacgccgtggggggtaacgacggtagctccagcctcaactccatcgagaagtacaacccgaggaccaacaagtgggtggccgcatcctgcatgttcacccggcgcagcagtgtgggtgtggcggtgctggagctgctcaatttcccgccgccatcctccccgacgctgtccgtgtcctccaccagcctctgacccacctaccaccagaggcctgcagcctcccacatgccttaaggggaccgtggcccccaccagggacgtcctgcgccatccgttcacgtctctgcatccattccttcatgtctttatttagttgtttatttatttagttatttatcttatttattgaggggtgaggagtgccacggctgcccgtttacacctttagcgtctggtcctcctgcgtgtcctcccctccactgcctgcatggggggcgcggggagtgaccaggcgggggcctcaccgccccagggccgttgcctgctcagaccttgcaggctgtggagcaagaggccctgggtctctccaagcagctgcagaccccagctcgaattttgcacatggcggggtcccgggaagggtggggagcagttgtccttcctgtcgtcgtctgccgtgtgccatctttcctggatcttgtagtgggtgcacacgcgtgcactgggaccccacacagcaatacgagtccaacttaataaacacatttctggggttcctcaaaaaaaaaaaaaaaaaa

SEQ ID NO: 6877 - DNA, 1332 bp, Homo Sapiens
  NM_198318
ggggggtcttggcggccggaggaggagtaggtgcgggtgaagatggcggcagccgaggccgcgaactgcatcatggaggtgtcctgtggccaggcggaaagcagtgagaagcccaacgctgaggacatgacatccaaagattactactttgactcctacgcacactttggcatccacgaggagatgctgaaggacgaggtgcgcaccctcacttaccgcaactccatgtttcataaccggcacctcttcaaggacaaggtggtgctggacgtcggctcgggcaccggcatcctctgcatgtttgctgccaaggccggggcccgcaaggtcatcgggatcgagtgttccagtatctctgattatgcggtgaagatcgtcaaagccaacaagttagaccacgtggtgaccatcatcaaggggaaggtggaggaggtggagctcccagtggagaaggtggacatcatcatcagcgagtggatgggctactgcctcttctacgagtccatgctcaacaccgtgctctatgcccgggacaagtggctggcgcccgatggcctcatcttcccagaccgggccacgctgtatgtgacggccatcgaggaccggcagtacaaagactacaagatccactggtgggagaacgtgtatggcttcgacatgtcttgcatcaaagatgtggccattaaggagcccctagtggatgtcgtggaccccaaacagctggtcaccaacgcctgcctcataaaggaggtggacatctataccgtcaaggtggaagacctgaccttcacctccccgttctgcctgcaagtgaagcggaatgactacgtgcacgccctggtggcctacttcaacatcgagttcacacgctgccacaagaggaccggcttctccaccagccccgagtccccgtacacgcactggaagcagacggtgttctacatggaggactacctgaccgtgaagacgggcgaggagatcttcggcaccatcggcatgcggcccaacgccaagaacaaccgggacctggacttcaccatcgacctggacttcaagggccagctgtgcgagctgtcctgctccaccgactaccggatgcgctgaggcccggctctcccgccctgcacgagcccaggggctgagcgttcctaggcggtttcggggctcccccttcctctccctccctcccgcagaagggggttttaggggcctgggctggggggatggggagggcacatcgtgactgtgtttttcataacttatgtttttatatggttgcatttacgccaataaatcctcagctgggaaaaaaaaaaaaaaaaaaaaaaaaaa

SEQ ID NO: 6878 - DNA, 1505 bp, Homo Sapiens
  NM_198319
ggggggtcttggcggccggaggaggagtaggtgcgggtgaagatggcggcagccgaggccgcgaactgcatcatggagaattttgtagccaccttggctaatgggatgagcctccagccgcctcttgaagaagtaacccccctttgcccttccctgtgtctgcccccattttccttcccctcccctccccagctgtgggctgagctagagacggggtcagagagactggagagatggtaggcgtggctgaggtgtcctgtggccaggcggaaagcagtgagaagcccaacgctgaggacatgacatccaaagattactactttgactcctacgcacactttggcatccacgaggagatgctgaaggacgaggtgcgcaccctcacttaccgcaactccatgtttcataaccggcacctcttcaaggacaaggtggtgctggacgtcggctcgggcaccggcatcctctgcatgtttgctgccaaggccggggcccgcaaggtcatcgggatcgagtgttccagtatctctgattatgcggtgaagatcgtcaaagccaacaagttagaccacgtggtgaccatcatcaaggggaaggtggaggaggtggagctcccagtggagaaggtggacatcatcatcagcgagtggatgggctactgcctcttctacgagtccatgctcaacaccgtgctctatgcccgggacaagtggctggcgcccgatggcctcatcttcccagaccgggccacgctgtatgtgacggccatcgaggaccggcagtacaaagactacaagatccactggtgggagaacgtgtatggcttcgacatgtcttgcatcaaagatgtggccattaaggagcccctagtggatgtcgtggaccccaaacagctggtcaccaacgcctgcctcataaaggaggtggacatctataccgtcaaggtggaagacctgaccttcacctccccgttctgcctgcaagtgaagcggaatgactacgtgcacgccctggtggcctacttcaacatcgagttcacacgctgccacaagaggaccggcttctccaccagccccgagtccccgtacacgcactggaagcagacggtgttctacatggaggactacctgaccgtgaagacgggcgaggagatcttcggcaccatcggcatgcggcccaacgccaagaacaaccgggacctggacttcaccatcgacctggacttcaagggccagctgtgcgagctgtcctgctccaccgactaccggatgcgctgaggcccggctctcccgccctgcacgagcccaggggctgagcgttcctaggcggtttcggggctcccccttcctctccctccctcccgcagaagggggttttaggggcctgggctggggggatggggagggcacatcgtgactgtgtttttcataacttatgtttttatatggttgcatttacgccaataaatcctcagctgggaaaaaaaaaaaaaaaaaaaaaaaaaa

SEQ ID NO: 6879 - DNA, 1679 bp, Homo Sapiens
  NM_198333
tttgtgcaaataaggtttctgtggtgagacaccagataaactcaacttcctctttcaacaacaaatgtgtcagttatcagcaggatccatgccgccagagtaaagctttctaccctttactccctgcaaagaaacaagagtgcttatcccagctaagctccagggaaccataaatccatggctaaccttgacaaatacactgaaacattcaagatgggtagcaacagtaccagcactgctgagatttactgtaatgtcactaatgtgaaatttcaatactccctctatgcaaccacctatatcctcatattcattcctggtcttctggctaacagtgcagccttgtgggttctgtgccgcttcatcagcaagaaaaataaagccatcattttcatgatcaacctctctgtggctgaccttgctcatgtattatctttacccctccggatttactattacatcagccaccactggcctttccagagagccctttgcctgctctgcttctacctgaagtatctcaacatgtatgccagcatttgtttcctgacgtgcatcagtcttcaaaggtgcttttttctcctcaagcccttcagggccagagactggaagcgtaggtacgatgtgggcatcagtgctgccatctggatcgttgtggggactgcctgtttgccatttcccatcctgagaagcacagacttaaacaacaacaagtcctgctttgctgatcttggatacaagcaaatgaatgcagttgcgttggtcgggatgattacagttgctgagcttgcaggatttgtgatcccagtgatcatcatcgcatggtgtacctggaaaactactatatccttgagacagccaccaatggctttccaagggatcagtgagaggcagaaagcactgcggatggtgttcatgtgtgctgcagtcttcttcatctgcttcactccctatcatattaactttattttttacaccatggtaaaggaaaccatcattagcagttgtcccgttgtccgaatcgcactgtatttccaccctttttgcctgtgccttgcaagtctctgctgccttttggatccaattctttattactttatggcttcagagtttcgtgaccaactatcccgccatggcagttctgtgacccgctcccgcctcatgagcaaggagagtggttcatcaatgattggctaaaattaagatatctctttaattacgcctttgtttacctacgttccttgtctttttccaaaggccagaattgtcaaccaatttctttaattgaacattgtaaaaaacaggaataagtacttttgtgtaatattcacagtcaacaggggtgtgatggtgaaggcagagtgtgaaaaacgtgagagaggaagagaaaatagatttacctgattcctctttaaaattcaagccactttcttatttaagaaacctagatcaagtttttacagatgtaaataaaagttgaatagtttaccttaaatttttttcaataagtaagttattgttaataatgcacagtaaatatgtgaatttttcctagatgtaaaaaaaaaaatctttcatataaagaccttaaattctgaaaaaaaaaaaaaaaaaaaaaaaaaaaaaaaaaaaaaaaaaaaaaaaaaaaaaaaaaaaaaaaaaaaaaaaaaaaaaaaaaa

SEQ ID NO: 6880 - DNA, 2824 bp, Homo Sapiens
  NM_198395
gagtggcagttatatagaccggcggcggagcacgcgtgtgtgcggacgcagttgcgtgaggggtttgtactatcctcggtgctgtggtgcagagctagttcctctccagctcagccgcgtaggttgaattgaccaaagcaatggtgatggagaagcctagtcccctgctggtcgggcgggaatttgtgagacagtattacacactgctgaaccaggccccagacatgctgcatagattttatggaaagaactcttcttatgtccatgggggattggattcaaatggaaagccagcagatgcagtctacggacagaaagaaatccacaggaaagtgatgtcacaaaacttcaccaactgccacaccaagattcgccatgttgatgctcatgccacgctaaatgatggtgtggtagtccaggtgatggggcttctctctaacaacaaccaggctttgaggagattcatgcaaacgtttgtccttgctcctgaggggtctgttgcaaataaattctatgttcacaatgatatcttcagataccaagatgaggtctttggtgggtttgtcactgagcctcaggaggagtctgaagaagaagtagaggaacctgaagaaagacagcaaacacctgaggtggtacctgatgattctggaactttctatgatcaggcagttgtcagtaatgacatggaagaacatttagaggagcctgttgctgaaccagagcctgatcctgaaccagaaccagaacaagaacctgtatctgaaatccaagaggaaaagcctgagccagtattagaagaaactgcccctgaggatgctcagaagagttcttctccagcacctgcagacatagctcagacagtacaggaagacttgaggacattttcttgggcatctgtgaccagtaagaatcttccacccagtggagctgttccagttactgggataccacctcatgttgttaaagtaccagcttcacagccccgtccagagtctaagcctgaatctcagattccaccacaaagacctcagcgggatcaaagagtgcgagaacaacgaataaatattcctccccaaaggggacccagaccaatccgtgaggctggtgagcaaggtgacattgaaccccgaagaatggtgagacaccctgacagtcaccaactcttcattggcaacctgcctcatgaagtggacaaatcagagcttaaagatttctttcaaagttatggaaacgtggtggagttgcgcattaacagtggtgggaaattacccaattttggttttgttgtgtttgatgattctgagcctgttcagaaagtccttagcaacaggcccatcatgttcagaggtgaggtccgtctgaatgtcgaagagaagaagactcgagctgccagggaaggcgaccgacgagataatcgccttcggggacctggaggccctcgaggtgggctgggtggtggaatgagaggccctccccgtggaggcatggtgcagaaaccaggatttggagtgggaagggggcttgcgccacggcagtgaatcttcatggatcttcatgcagccatacaaaccctggttccaacagaatggtgaattttcgacagcctttggtatcttggagtatgaccccagtctgttataaactgcttaagtttgtataattttactttttttgtgtgttaatggtgtgtgctccctctccctctcttccctttcctgacctttagtctttcacttccaattttgtggaatgatattttaggaataacggacttttaaagaagcaaaaaaaaagactgaatttccttgcttactttgcatatacagactggattttttttttttttttacagccatttccccaaaggaatgtcttgcatattactgacatttggtatgtttcattcattggaatatttcttattttctacgtgtttgaaaagcctgtaagaaatacaggatttgataatattttgaaggcaggaaaaacccaaattgtttcttctttgagagtcatgactaccttctggtgtggagaaattgccattggaaaatttgacaattttgattctcactggtatgtttaaaaactgaataaaaggaatagaatttttttttgataaaggatcacaaaacaattctaaaacctaactgtttttaccattgaaatttaaattgtgataataggttttaaatgtctagaatgcaactgataggcttttcttgaactgttagtttttttgaagtagttttttcatgtttaatttgtatttgtaaaaaaacaaaaagcaaaaaaattcccaaaacccagataacaaccagagcaaaactgttgtgccttctatttatctttgatttcagtcttggcaattgtttaaaaaaaaaatctagatttgttttattaggttcagagtatgtggggaattatagaatccctctttcatcactttgtgtatgtcttttgttaacatatttgttatgccttattctaaaattgagtctcaaactggaatgcctttgaagacagatgcttctatagaggttctttgacctaaatagttcagcatttgtatttttattctggtatctaatcagattcctaatcatagcccgtaagaaggaatgttactttaatattggactttgctcatgtgctcgtgtccgcatttttttttttcttaaaatcatagccatatggtaaattttctattttgttatggttctcttttattgatgggcatgcagtgggtgttacttggaaatggccaatttttattaaaatatttctggaagaaaatttaaaaaaaaaaaaaaaaaaaaaa

SEQ ID NO: 6881 - DNA, 2800 bp, Homo Sapiens
  NM_198401
gtctggcccctcccctccgcccgtcaccgcctccttgaagctgccgctgtcgctgctgctcgttcgagtcgcagatccttgccagcacattacagaatatttttgttgaaccttcttgagaattcagagaaactgctgagtgaccactgaacgaaaagatctaatcttaaggcttacgcctcactttgatgcccaggctggagtgctgtggctcaatcacagctcatcgcaacctcgacctcccgggctcaagtgatcctctcacctcagcgtcccgaacaggcgtgttccatccaccacatcagaacaatgtcgtatgtttttgtaaatgattcttctcagactaacgtgcccttgctgcaagcctgtattgatggggactttaattattccaagcggcttttggaaagtggctttgacccaaatattcgtgacagcaggggcagaacaggccttcaccttgcagcagctcgagggaatgtagacatctgccagttactgcataaattcggtgccgatcttctggccacagattatcaaggaaacacagctcttcacctctgtggccatgtggatactatccaatttttggtttccaatggactcaaaattgatatttgcaatcatcaaggtgctacccctttagttctggcaaagcgcagaggagtaaataaagatgtcatccgattgctggaatctttggaagaacaggaggtgaaaggatttaacagaggaacccactcgaaactggagaccatgcaaacagctgagagtgaaagtgccatggaaagccattcactcctcaatcccaacctgcagcaaggtgaaggagtcctctccagcttccgaaccacgtggcaggagtttgtggaggatctgggcttctggagagtattgctgttgatcttcgtcattgctttgctgtctcttggcattgcttattatgtgagtggggtgctacccttcgtggaaaaccagcctgaactggtgcattaaaggagctcatggaagatgaggcaattaattgcctgtttcctggcttccaatgtttgttctcagtttctcagaatttttcttagcgcaaagcagtgagggcagtacatgttctttttgcatttttaattattgtaatccttttagataatgatgtgttcatttgaactaactacatactatgatcaagtatattgcatcctaacgctacctctgactcaacctgactttgtaggaaagcctacacgtagccttgtttgataaaaacacggaagtgactagagaatggaagataaaggaagaagctaggaagtccttgctatcaaaaccttatcctaatataggaccaattgaagtattcaaaaagaaaaacagtatcttatatgattagtttttgttggtggttttgttttcatttatttttgcaagagccactttttatttactttctctagggataagagataaaacttgaagtacttttttcaaatcttgtgtgcaaattagtattgttagcatctatttggcttattttagtatttttaagtctagtcacaaaccaaacaaaacttttgaaaatgagctatattttgttcaaagataattgatttgatcttatatttatttgtttttaggataatttttgatctttttgtaaactgctttgcttgttaatatctgtgaaaaataaatgagttcattttgttcactttccaattttcccgagtatcctagtcatcaaagataacagttcatcagaattacagtcagaaaatcctttttctactgaatagttagcagggaaaaataattctgatatttaactgtcataattctgtagtgctattatagtgaaaaactcagttctataagctagctgtgttgtcacagttttatcatagttcataattatttcatgtgcaatcctatttggaggccctgttagacttttaacaatcccatccatatctgtaattctctgatggcaagaatggatggagcatttctgagttaacagtgctggacagtatcgtactgggtgtcataaactctttatgaatggtaatattatgtaaattgaaatctggccctcaaactatattgcagctttcagcagtatgtttgaaggcctcttttgttaatgattctgtaatgtatgaattatgttcttgagtggttaaaaaagaatatgaaggcttgataattatttattgggtaaagtcaggaaattgtagtgaaagaactaatggttttgttttttggaataaaggcacctaagctattgctaattgaattgctgctagaattagaaattatgctttagaatagaattggtatttctgtgattctttttgcttcttggtattttctcttgtatctatgtatctagtattgaggcttgctctttcatgtggctttatcctctctttaatagctgttgtaaaattcctgagtaactggctgcttcaggatcagcttgcagagtcttgcttttaggttagatacaaacaaagtaaatcatagttggtgtaaatccagcaaaaaacagctggctttggaatggagaacactacaattcaaatttgaagtatattcagaagaaaactttggaattagctttacatttgtttgtaaatctaaacaaatatgcaaaattggtcaaaatgtaagtatatagcatttttaaagattaatggttccttttatgtgctgatttctttgtattctgttctctgcattcatcattcaggaataccaccaataaatgtatttatatatcccttaaaaaaaaaaaaaaaaaaaaaaa

SEQ ID NO: 6882 - DNA, 1187 bp, Homo Sapiens
  NM_198402
agtccggcccgagccgctcgcgctaggagagcgggcttcgggcacttgacatggcggcagtggcggcgactgcagcagcgaaggggaatgggggcggcggtggcagggccggggccggggacgccagcggcacgcggaagaagaagggcccggggcccctggccacggcgtacctggtcatctacaatgtggtgatgacagccgggtggctggttatagcggttggtctggtccgagcatacctggctaagggtagctaccatagcctttattattcaattgaaaagcctttgaaattctttcaaactggagccttattggagattttacattgtgctataggaattgttccatcttctgttgtcctgacttctttccaggtgatgtcaagagtttttctaatatgggcagtaacacatagcgtcaaagaggtacagagtgaagacagtgtcctcctgtttgttattgcatggacgatcacggaaatcatccgttactccttttatacattcagtctattaaaccatctgccttacctcatcaaatgggccaggtacacacttttcattgtgctgtacccaatgggagtgtcaggagaactgctcacaatatatgcagctctgccctttgtcagacaagctggcctatattccatcagtttacccaacaaatacaatttctcttttgactactatgcattcctgattctaataatgatctcctacattccaatttttccccagttatacttccacatgatacaccagagaagaaagatcctttctcatactgaagaacacaagaaatttgaatagttcctgctttctgcacctcccaccaaaacaaacttttcaatgatcaaaaaatgctgcagattttttgagttcccaatacgtttcatagaaaataagtaagaactatttttaaaatattcaaacaaaactaaaacaaaaatccagtgtcacatgggcctgagattttattttagaaaaaggttgttacataaaacaccctggccagttcatttcagcatgctctttcaaccagaagttcttaatatttatgatggcactagaaagggatttggcattttatgtccttctgtgtccttcatgtatctgatcaatgaagacctgtaacactaagtacttgagagttacagtctgaataatgaagtcgtaccagct

SEQ ID NO: 6883 - DNA, 2245 bp, Homo Sapiens
  NM_198434
acaaggcagcctcgctcgagcgcaggccaatcggctttctagctagagggtttaactcctatttaaaaagaagaacctttgaattctaacggctgagctcttggaagacttgggtccttgggtcgcaggtgggagccgacggggtctcactccattgcccaggccagagtgcggggatatttgataagaaacttcagtgaaggccgggcgcggtggctcatgcccgtaatcccagcattttcggaggccgaggcatcatggaccgatctaaagaaaactgcatttcaggacctgttaaggctacagctccagttggaggtccaaaacgtgttctcgtgactcagcaatttccttgtcagaatccattacctgtaaatagtggccaggctcagcgggtcttgtgtccttcaaattcttcccagcgcattcctttgcaagcacaaaagcttgtctccagtcacaagccggttcagaatcagaagcagaagcaattgcaggcaaccagtgtacctcatcctgtctccaggccactgaataacacccaaaagagcaagcagcccctgccatcggcacctgaaaataatcctgaggaggaactggcatcaaaacagaaaaatgaagaatcaaaaaagaggcagtgggctttggaagactttgaaattggtcgccctctgggtaaaggaaagtttggtaatgtttatttggcaagagaaaagcaaagcaagtttattctggctcttaaagtgttatttaaagctcagctggagaaagccggagtggagcatcagctcagaagagaagtagaaatacagtcccaccttcggcatcctaatattcttagactgtatggttatttccatgatgctaccagagtctacctaattctggaatatgcaccacttggaacagtttatagagaacttcagaaactttcaaagtttgatgagcagagaactgctacttatataacagaattggcaaatgccctgtcttactgtcattcgaagagagttattcatagagacattaagccagagaacttacttcttggatcagctggagagcttaaaattgcagattttgggtggtcagtacatgctccatcttccaggaggaccactctctgtggcaccctggactacctgccccctgaaatgattgaaggtcggatgcatgatgagaaggtggatctctggagccttggagttctttgctatgaatttttagttgggaagcctccttttgaggcaaacacataccaagagacctacaaaagaatatcacgggttgaattcacattccctgactttgtaacagagggagccagggacctcatttcaagactgttgaagcataatcccagccagaggccaatgctcagagaagtacttgaacacccctggatcacagcaaattcatcaaaaccatcaaattgccaaaacaaagaatcagctagcaaacagtcttaggaatcgtgcagggggagaaatccttgagccagggctgccatataacctgacaggaacatgctactgaagtttattttaccattgactgctgccctcaatctagaacgctacacaagaaatatttgttttactcagcaggtgtgccttaacctccctattcagaaagctccacatcaataaacatgacactctgaagtgaaagtagccacgagaattgtgctacttatactggttcataatctggaggcaaggttcgactgcagccgccccgtcagcctgtgctaggcatggtgtcttcacaggaggcaaatccagagcctggctgtggggaaagtgaccactctgccctgaccccgatcagttaaggagctgtgcaataaccttcctagtacctgagtgagtgtgtaacttattgggttggcgaagcctggtaaagctgttggaatgagtatgtgattctttttaagtatgaaaataaagatatatgtacagacttgtattttttctctggtggcattcctttaggaatgctgtgtgtctgtccggcaccccggtaggcctgattgggtttctagtcctccttaaccacttatctcccatatgagagtgtgaaaaataggaacacgtgctctacctccatttagggatttgcttgggatacagaagaggccatgtgtctcagagctgttaagggcttatttttttaaaacattggagtcatagcatgtgtgtaaactttaaatatgcaaataaataagtatctatgtctaaaaaaa

SEQ ID NO: 6884 - DNA, 2231 bp, Homo Sapiens
  NM_198436
acaaggcagcctcgctcgagcgcaggccaatcggctttctagctagagggtttaactcctatttaaaaagaagaacctttgaattctaacggctgagctcttggaagacttgggtccttgggtcgcagggtctcactccattgcccaggccagagtgcggggatatttgataagaaacttcagtgaaggccgggcgcggtggctcatgcccgtaatcccagcattttcggaggccgaggcatcatggaccgatctaaagaaaactgcatttcaggacctgttaaggctacagctccagttggaggtccaaaacgtgttctcgtgactcagcaatttccttgtcagaatccattacctgtaaatagtggccaggctcagcgggtcttgtgtccttcaaattcttcccagcgcattcctttgcaagcacaaaagcttgtctccagtcacaagccggttcagaatcagaagcagaagcaattgcaggcaaccagtgtacctcatcctgtctccaggccactgaataacacccaaaagagcaagcagcccctgccatcggcacctgaaaataatcctgaggaggaactggcatcaaaacagaaaaatgaagaatcaaaaaagaggcagtgggctttggaagactttgaaattggtcgccctctgggtaaaggaaagtttggtaatgtttatttggcaagagaaaagcaaagcaagtttattctggctcttaaagtgttatttaaagctcagctggagaaagccggagtggagcatcagctcagaagagaagtagaaatacagtcccaccttcggcatcctaatattcttagactgtatggttatttccatgatgctaccagagtctacctaattctggaatatgcaccacttggaacagtttatagagaacttcagaaactttcaaagtttgatgagcagagaactgctacttatataacagaattggcaaatgccctgtcttactgtcattcgaagagagttattcatagagacattaagccagagaacttacttcttggatcagctggagagcttaaaattgcagattttgggtggtcagtacatgctccatcttccaggaggaccactctctgtggcaccctggactacctgccccctgaaatgattgaaggtcggatgcatgatgagaaggtggatctctggagccttggagttctttgctatgaatttttagttgggaagcctccttttgaggcaaacacataccaagagacctacaaaagaatatcacgggttgaattcacattccctgactttgtaacagagggagccagggacctcatttcaagactgttgaagcataatcccagccagaggccaatgctcagagaagtacttgaacacccctggatcacagcaaattcatcaaaaccatcaaattgccaaaacaaagaatcagctagcaaacagtcttaggaatcgtgcagggggagaaatccttgagccagggctgccatataacctgacaggaacatgctactgaagtttattttaccattgactgctgccctcaatctagaacgctacacaagaaatatttgttttactcagcaggtgtgccttaacctccctattcagaaagctccacatcaataaacatgacactctgaagtgaaagtagccacgagaattgtgctacttatactggttcataatctggaggcaaggttcgactgcagccgccccgtcagcctgtgctaggcatggtgtcttcacaggaggcaaatccagagcctggctgtggggaaagtgaccactctgccctgaccccgatcagttaaggagctgtgcaataaccttcctagtacctgagtgagtgtgtaacttattgggttggcgaagcctggtaaagctgttggaatgagtatgtgattctttttaagtatgaaaataaagatatatgtacagacttgtattttttctctggtggcattcctttaggaatgctgtgtgtctgtccggcaccccggtaggcctgattgggtttctagtcctccttaaccacttatctcccatatgagagtgtgaaaaataggaacacgtgctctacctccatttagggatttgcttgggatacagaagaggccatgtgtctcagagctgttaagggcttatttttttaaaacattggagtcatagcatgtgtgtaaactttaaatatgcaaataaataagtatctatgtctaaaaaaa

SEQ ID NO: 6885 - DNA, 3046 bp, Homo Sapiens
  NM_198445
cttcctctctccacttcctgctactgcaggcctctcctccgagaacagaggccaggtcatgactcactggcttcctgcaacctgacgatggcccagccagaagacaaggcacctgaagtccccacagagggggtgaggtgaacaaagcagacaggacccctctaggggtcctcagcaccctagagccacttactcgcctgcagaggacatggggggtgtggcatgtgccagagctggatacccaggatgcggaggcccttgtggggctgtggccactagggagtttcttggtcacaggacgtgaccccagccaggccctggtgttgaggtcaggacctttaccaggagaagtcaatacctaccagatccagaagattcccagaggtgtgtccctggaatcctccaacctctgcatgccagacctgccccatctcctggcctttctatcagccagcagggatgttctgcccagaaccctgctcttgccccctcccactctagggcccagagatgaacacacagatcctgtgcagatcggcagggtccaacaggacaccccagggaaggtgctttccattgtgaaccagctctacctggagacccacagaggctgggggagggagcagacccctcaagaaacagagccagaggctgctcagagacatgatccagcccccaggaaccctgcgcctcacggggtctcctgggtgaaaggcccgctcagcccggaagtggaccatcctgggccggctctcgccagcctactggaagaggaggaggaagaccttgaaggaaaggaggaaggaagggaggacgaccctgaagaggaaggccctgaggacgtgctcaccattcacgtccagtctctggtcagggcccggagcagctacgtggccaggcagtaccgaagccttcgggtgcgcatcgcctcagattctgggggtccccacgggtctggggacccggccacggagctgcttcaggatgtgcggcacctccttactgacctccaggatcacctggcaaaggactcctacatcagggctgtctttggaagcaggggtcctgggctccccaagaaggacgaggatccaggccccgcgctggagacggcggtgtgccaggcggtgctggcgcccctgaagccggccctgtggacacgactccgcacactccgagcaccggagctgcggcggctgcggcggcgacagacagccctgcgggcgggggcggggcctccgggggcacaggggccgggaccggaagggcagagccccgcccccgccttgcggagccgcatccacgagcgccttgcgcacctccacgctgcctgcgccccgcgccgcaaggtggcgctcctcttggaggtgtgcagagatgtctatgcgggcctggctcgaggcgagaaccaagatcccctgggggccgacgccttcctgccggcgctgaccgaggaactcatctggagcccggacattggggacacgcagctggacgtagagtttcttatggagctcttagatccagatgagctgcggggagaggctgggtactacctgaccacgtggtttggggcgctgcaccacattgcccactaccagcccgaaacagaccgcgctccccgggggctcagctccgaggcccgcgcctccctgcaccagtggcaccgcaggcggacgctgcacagaaaggatcatcccagagcccaggccaacctgccctttaaggagccatgggcagaagagactgtgacagggaccagtgacaactaggggtttcacacccctccgttcatgcctgtaatcccaacattttgggaggccaaggtgggaggattgcttgagcccaggagtttgagaccagcctgggcaaaacagtgggacccccatctaccaaaaaaaaaaaaaaacaaaaattagccgggcgtggtggcgtactcctgtggtaccagctactcaggaggctttgcagttttagacaggcgtatcagagaaagcctcactgaggtgacatctgcagaaaggcctgaaggaggggaggggaagggaggagcagagtgggtattaggaagagcattccgagaagcaggatgagccagtgcaaaggcccagaggtaggctgttcccttttcctgggacccctccctcctccttgctgctcctaaaccacataggtcaggagtctggactgacccaggtacgtctggcatcttgcttgaggaacagggggttttgttttgttttgaaagaacgtctctgtctgttgcccaggctggagtgtagtggcatgatctcggctcactgcagccttaacctcctggctcaaacaagccccctgcctctgcctaccaagtagctgagactacaggcacctaccaccgtgcctgtctaatttttaaaattttttataaagatgaggtctctctttgttgcccaggctggtctcaaactcctaacctcaagcaatctgcccacgtcggcctcccaaagtgctgagattataggcgtgagccaccgtgcccaattgtgatcgtttttcccaaagaatgtatcacatgctaacaaaccatatatttatgtatttcattgttcatagtaactacaatttaaaaaactaaaaagaaacaagtgaggccgggtgcggttgctcatgcctgtaatcccagcactttgggaggccaaggtgggcagatcacctgaggtcgggagttcaagaccagcctgacaaacatggagaaacccgtctctactaaaaatacaaacttagccgggcatggtggcgcatgcctgtaatcccagctactccggaggctaaggcaggagaatggcttgaacccgggaggcgaagattgcggtgagcggagattgcgccattgcactccagcctgggcaacaagagtgaaacaccatctcaaaaataaataaataaataaaaagaaacaagtgaagttaacgttaataataatatatttgatttaacacaatgtatcccaaatattatcacttcaacatgtatccatattaaaaagttactgacatatttaaaa

SEQ ID NO: 6886 - DNA, 1359 bp, Homo Sapiens
  NM_198446
tcggccacgcggccgaggcatacggccagaggcttggcctcgctgcgacccttgaggcggtacacagcgcgcagagccgccgagcagctcgccgcgcaggccaggccgtacagcgtatcggtggggacggccaccacggcgccggcgcgcagctcggccacggcggcccgcagcgcctcggtccagccggcgcgctccgggctcgcggcctgcacggccccgctccccgggagccgcaacagccgggcgccgggggccgccggagcgggactcggcgggcggaagaggcgaccgctccgggagccagcaggcccctcgctcaaccccacgctggcagccaccgcggccctcatccccctgcaccgacgcgccggagacatccgcccaggcccgcttccgggaggaagtgacgctcccagccagcttccggtccaggagactcggccccgcctctgcgccgggcagcttaaagggaccacgacccccaggaggattgaaggagaccggtggggacggggcggggcgcagccttgcgaagccctaacgcagcgctggggaggggggcggccgaaaggggggcggtggtcgggccgcgcaagcggagatggaatggggcccgggctcagactggtcacggggggaggctgccggcgtggaccgcgggaaggcggggctggggctcggcgggaggccacccccacagccgccccgggaggagcgcgcccagcagctgctggacgcggtggagcagcggcagcggcagctcctggacaccatcgcagcctgcgaggagatgttacggcagctgggccgccggcgcccggagccggctggtggcgggaacgtctcagccaaacctggagcgcccccccagccggctgtctccgccagaggcggctttccaaaggatgctggcgatggagctgcggagccctgaccatccccgagcagaataccctgacttctctccctccccagggccggtggctggactctgaacaactcccttcagtaaaggggccagtcttcactggcagtggctggtacttggctctcagcctggagtggcagctctgctagcagctgggttcactcccacttcatcctggctgaaagcagtgctgtgctttgaaatgcagccaatgaatacccagtctgattacccagatttgggcagaccagcagtgctcgccagagtggtctggcctgctatgggggatccaggtggtgttacatgtccatttcatgttttgggggcttttagccccacaaaacaccttcagtagagccttgattaaaaggaaacctgcagactctcaaaaaaaaaaaaaaaaaaaaaaaaaaaaaaaaaaaaaaaaa

SEQ ID NO: 6887 - DNA, 3974 bp, Homo Sapiens
  NM_198459
ggggctagggggtggggctgcagccgggacggggccttcggcagggcctgcgggggcgggacggagcggacccgagtgatacccgggagactagcttggccacaggagacaacgttgaggtacagacaggattattcaagatcaggttgtagccattttcaacaaggatcactgatcaaaattttctttttacaaagagatttacaagttaaacatgaagggaaaatactggaatcatttggattctgacaggataaagaatacaatatttcacatttacttgtaatggaacctttgtaagattcatcacttgtcattcacccagttgggaacatggatgttggtttttctcgtactactgttcagacactgtcaagaagccactgcaaaaacatcaaacaaaaaatttctcaatgggaaggaagggctaatggtatatctaatccagaaaagtggtgtccaaaggactttggagtgagatataactgtcaccaagagatccgtcttaagaaaaatcctatagctgagagaaagagcaaaaacttggatgtaaccagccgtgaaaatgtgggtctagatataaatgaaaataccaaaagccatgatcaaagtgagaatgaaaataagaaacatgaatatgacgatacacacttctttaaaaatgaatcagaatccaactgggtatgttctcgggtcaaagaaattgaaagctgtaaagaagatgtcttagatccagagacttcattacctccaggaaacttctatacctcacaaatactgtggaagaaaatagaagcacttcccccagataaactcttaaatttggctttagaacattgtgactcttcagaaaaagaactgaacttcagagttctggatagttcatacggaataaccaagagcttagaaaatatttactctgaacctgaggggcaagaatgtggaccttccataaatcctttgccaaaacctcgtaggacattcagatatttatccgaatctggtgttacgccgtataaagaaagaaactgtgacaaaaaatactgtgaaaataactcttgtgcacaatcttctttggcctcttctcaggaacctgaaccaaagaaatatggtggaaaaatcagaggaagatctaaaaggaaatcctttgaatttgaggatattcagcactttcgaaatcggaactcacagacgattcgtgaagaacttggaagaaattctgggtcagcactttattacacacagtctgaggacaatatctatgaagatatcatatatcccaccaaagaaaatccatatgaagatattccagtgcagcctttacctatgtggagatccccttcagcatggaagctaccacccgctaaaagtgcttttaaagcacccaagcttgtattgaaaatagatgacatatttgaatctaaaagagggaagaagaaggtaaagttacattcttacactggaaaggaattacctccgacaaaaggtgaaaccagtgggaacgaaagtgatgccgagtatctgccaaagaatcgccataaacgcttagcacaactgcaaccgtcttccaagaggaatcctcactaccagaccttggagcgggatcttattgaattacaggagcagcagctgtttgaactttttgtggtggtgtctctacagaagaaaccatcaggaataagctatattccccaggtcatacaacaattccctggcaaggatgatcatggctataagcagtccaaagacatggaagagagacttaaagttattccaaaattttgttttcctgattcaaaggactggatgccaacctcagaactcaagagtgaaacattctcctttgtcttgactggtgaagatggaagccggtggtttggttactgtaagaagctcttgccagtaggcaaaggaaagcgactccctgaggtatactgcatggttagtcgcctaggctgcttcaatcttttttcaaagattctggatgaagtagagaagagaagagaaatgtctccagcccttgtttacccattcatgcgaagtgtcatggaagctcctttcccagctcctggacgcaccatcacagttaagagttacctccctggggctggagatgagtccattgaactctgccgaccactagattcccgattggaacatgttgattttaaatgtctctttaagtgcctgagtgtgtgtcatctcatccgggtctgtgcctctctccttttggagcgtagggtaatctttgttgccaacagcctaagcaccctgtcaaaatgtggccatgctgtggtagctacactgtatccgttcacctggcagcatacctatatcccagtcctgccagcatctatgattgacatcgtgtgctcacctacaccattccttattggaatcctgtcttgctccttaccacagctccaggacctacccattgaagaggtgctgatagttgatctctgtgcagacaagttcttacaggaggtatctgatgaggatgaaattctaccaccaaaacttcaagctgccctgatgcagattttggaagaacgaaatgaaatcttgactcaggagcagaatttttcacaagatgtgacactcaactctctggtgtccgaagcatttgtcaggttttttgtggagttggtaggacattattctttgaacatgactgtcactgagcgtggggagcgtgttttccaaagggaaccattccgtaagtcccacacctcccgaagtgtacgccacttcctggatctcttcatggaaactcagatgtttgcaggattcatccaggaccgagagcttcggaaaagtggagttaaaggtttgtttgagatccgggccatccagtatttggaaacaattcctgagtcggagcccagtgggatgaatagaattttgcggagtcttggaagcaaaatgaaatttctgcaaaagaaatgaaatctctgattgtctccatcctgaatatacaacagaaagtgccaaagaaaatatttttctaagggtcaggatcccatgaagtattctacaaaattcttgaaattttaaaaggttaaagagcgagtcaggctgttagaggaggattctcctgttgctgctgtagtaatcactggagaattgttgggaatggtctggcaccatgccatctttactctgtctccattttttttttatagcagccttttctatgtgattcttgggctcattctctgttttgtgctttgtctgtgaaagtagttgtgtttcacaaggaaaagccttgttgttgttacatttaaaaaatagctcaaagatgagaataatgagagaaatgctgagtttaaggtagtagagagacatgatggaaatggagaacactagccttatacacataattctcatcactgaactatcatggcccctttaaacccatgggctgtttgacctgggctaaggaatagactcatcacatatctccattgttttgccttatattatatctaggggaatctcacttaggaggaagccctacttgtaatattataaggtactgttattaagtaccttataaaattagacatcttgcaactcctcctccaaattatgtggcatttgagtagtttgcttgtgcctcacatgtcaacattaaactttgtggaggctggatgcagtggctcacacctgtaatctccaccactttgggaggctaaggcaggagtttgagggtgggagtttgagactagcctgggcaacatagcaagatcccatctctacaaaaacattttaaaaataagtaaataaatttaaactttgtgaaattatagctaatatgaaaatgtcctttcaagggcatgggagccacctttattttttagtgtccaccatgtgccatgcactgtggtatatgtatgcatatcatctcaaccaatccttaaatcaaccttatgagatagatatttgcatctccattttactaataaactgag

SEQ ID NO: 6888 - DNA, 4483 bp, Homo Sapiens
  NM_198462
gattgatgaattgcagacagctatcaaaagtaacataggtcatctctgtaaacttggcccccaattacaggctgagcaggagcaattctcctcttatgtctaccaacacattaaaagccttccagcaaacacgcttgtcccaggaggcctgcagcttaaggtatttgaaaatggtaaaaacactggagagatctctgttggtatcagtaaaaaagatttgggatcggatagcccaattcaaactgaccatatgatggaaagattacttctcaagattcatcaaaggcttcaaggttcttccatcaacccaccaggcctcaattattcttcaatgcggctttttgatgagaatggccaagaaattaagaatccactttcgctgaagaatgagcaaaaaatttgggtctcttatggtagagcatacagatctccactaaatcttgctttgggtttgacctttgaccgagtgagtgcatttgccagaggtgatatcatggttgcatataagacctttttggatcctaatgctgttctgctacctggatgtggcaattgggaagtttgtgagggatttccaattaatttcaactgtaccagtcaacagatacctgaccagtttgaaaaggtggacttggagaaccattttctacagaacaaggtagatcccaatattgtccttcatgcctctgtttccattggaaagtggagtttctcaggcagtgaagcaagcagcaggagtcaaatagcgccatcgatcctgtggcctgtagccagtgtgtggctgatcaccaagactggaatgatcctgagccgagcgataactcagggctgcctggctattggtcatcctatcagagtcaaggctgctgagggaacatcactagaaggatataaattaatcttacagaaaagacatagtggagatgactctcagaagtgggtgtttggaactgatggttgcatttattcaaaggcttatcctcagtttgttctgacctacctagaggagctaaatgcacaagtagatgtgacccagacagagtatcacattcaccatggtgcctggaccacagctcatcaggaacatggcagaaacttagcagaagaggttctgcaagaaagtgccagcaaccttggtctgaagcaactgccagaaccctcagacacccatttaatgccagaaggttctcttgaggagacgggggagctgacagtagcactggtgaggaaactggaagagaaacatcctaaggcttctgctcagaggtgggccataaaacatgaaggaaccagtaagccaggccagtggaaacattctagagttgaaaatcctctatggaacaagcttacctacatgtggcctgtccttcccagtggccaacttaatgaggagtttgattggccaatacaaggactgcttgttccgagcagtcctcccatgaagaaacccatctgtaagacaacagagccatatgcccctgtgcgactcagagttttgcagaatggagagaagaataaaaacagatccgttactatccttggtccagatatctcacctggacggaaaacgcagtgcactgagattttaaatttaccttctgcagctcggagattgtacaatgaaaaggggaaggaaatatttgccttaaaagacctgcaaagagatgaactggtgtatgtttcatgtggagaactctggatcaatcctgacctgtccattgctcagcaaaagaaacaaatattcctgaggaacctagaatcagacattgccaaaattcaaatcttctgcagcacacataaaatagaagctcttgttttagaagtccaaagtgacattgtatctggaagcaagcttgctgtgcataaacctgtagcaatttttggagaagagaagcaagttacagaaccggaagaaaagcaaatgcaagaagatcctctaacaacggaaaatgcttccagtgaaattctagattcacacgtaagagctcatcttcgaatgaaggcttgtcacacacttcccaggtatgcctggcaggaaacttcacatgactttgatgaggatgacagtcttccaaagaaaacggaaaaagggctctttgaaaatgtggaaccacagaagaaacacagctgttcaccaaagcatagtaaattgcacaagcattgtcatcagcagttcgaatacagagatgggcagattataagccatgctgctcctcagctagtcttgggggttcaaggtcccaatctccgatcaggcatggaggtggttttggtggagaagaaatctgatggtagtcatcagcgctggatacaccaggaagacagcaggacctttcaccttgtgagtaaccctgaccttgtgctggcagtgtctatgaccaagactagaaatgaagtttgtggctatccagttattgttcagaaatataagccgtacaacaatggagctgccaatcaaaagtggcattacatgaaaaatataaaagcacttgtggcctttcatagcactgccttggataaggaaattacatcagcaaattatgctggtgtctgtacatcatctgtgattaaagaagaaaacattgatcaaccaggatactgttatctctcacctgatggaaagagaaaaactatgctctgcttggcttgtggacaatccatgagaacagagaaaggactgaaacaattgcttccaggggttccattcctctgtatttcaggcaccaagactcagaagcccttcttacaagggcccttcaaggtcatcagtgtggctgaggttgatttgtcgtgtgacaaggctgaaaaaactctaagttactaccaagcacgtctattgtctttacggatgaagacctgcacgcaagctgcatctcacagtggcatggcagccacacaccagaaggcagtgaaaataattgcatacaaaaatggggatgggtatcgtaatgggaagttaattgtggctggaacattccccatgcttcttacagaatgcacggaacaacttgggcttgccagagcagcctccaaagtatataccaaagatggaaccccaatctttaccttgcgtgatttggttttatgggctctagatgaatcctttctccagagagactctgagaaacaaaagcaagatgcagctcctgttggaaaagaacagataattgttgaaaaaaatccaagaatgaaagtgaaaaacagattatttgcaaaatctgtgacatccgatagtttggatggtatagacaagtctttgcttaccctcatcctcagaaatcctattgccatctgggtgtcttgtggtgaaccatttctacctccaaatgctttgcagaaagcagaaaaattagagaaacagaactggctaaaaaaggacagaattttggctgatctagataccatgagacacaaaatgagacagttaaaagggcggcgagtagcggcatgtcagccagccaccatggttcctaccaagagccctgtgcagcccgtggtggttgaaggaggctggaccgaacagactcaacaggaaattaaactcatggaacttataagacatacagaggcacacctttctgaaatccaagaaatggaatccaaaataaattttccaattgcaaccaaacgtatagcagtcaagccgagcaacctgtataagcagcccaacacaaaacgagtgtggatttatctaaatggaggcagacctgaagatggcacttatgcctggggcaaaactatttcagagctgctgcaagactgctcctctcgtctcaaaatgacccacccagctagagcactgtacacccccagtggagagccaattcagtcctgggacgacatagagcgagatatggtcatctgtgtgtctatgggacatggtttcaaaaccccaaaagagttaaaacaactgatggagatcagagcaaattatgccagaatccgaaggcagcagggccctcaagccacagacattgtggtgtcaccatccacgaagctgctgtctctggcacatctccacaattaactcctatcagaaccatcggattttctgctgtatttttctggaaagaaaactttctttacccacttataaacagaagactgtgacaagaaggccaattatttccatcgctgaagactctaaatttggcaaatcttctaaataacaatcctgcatagtttattaaaaaaaattagtcgtaaaatttatccttcaaaaatctgcattttaaataaaccctgacagtgatttctcaagactgtaaagatattagtctgagaatgcaactctaacagactgctctgggcatcttttctctttgccttggccaggcctctcagaattgagtgagcgtgtgactccatttgcacagtgggacagatgagtacaactgaaataaaaagtggaggcctctgcaaaaaataaaaaataaaaaataaatttatccttcaaaataaaaaaaaaaaaaaaaaaaaaaaa

SEQ ID NO: 6889 - DNA, 3220 bp, Homo Sapiens
  NM_198467
ccgcgccggctagcggaggagagtaaatacaacaggagcgcaaaatggcggaaccgccgagccccgtgcactgtgtcgctgccgcggcccccaccgccaccgtctcggagaaagaaccgtttggcaagctgcaactctcctcccgggaccctccgggttctctgtccgccaagaaggtccggactgaggagaagaaggcaccgcggagagtgaacggagaagggggcagcggcgggaacagcaggcagctgcagccgccggcagcaccttcgcctcagagctatggcagccccgcgtcttggagctttgcccctctgtctgctgctccctccccgtcctcttctcggagcagtttctctttctccgctggcacggccgttccctcctcagcctccgcttccttgtctcagccggtgccgcgcaaactgctggtccctcctacgctgctgcacgctcagcctcaccatctcctcctgcccgccgccgccgccgctgcctcggctaacgccaagtcgcgcagacctaaggagaagcgggagaaggagaggaggaggcacggtctcggtggggcccgagaggccggcggggcctcccgggaggagaacggggaggtgaagccgctgccccgagataaaatcaaagacaaaattaaagagagagacaaagaaaaagaaagagaaaaaaagaaacataaagtaatgaatgagatcaagaaagagaatggagaagtaaagattttgctgaaaagtgggaaggagaaaccaaaaacaaatatagaagacttacaaattaaaaaggtaaagaagaaaaagaaaaagaaacacaaagagaatgaaaaacggaagcgtccgaaaatgtatagcaaatctattcagaccatctgctcaggattgctaactgatgttgaagatcaagcagccaaaggcatcctaaatgataacataaaagattacgttgggaagaatttggataccaagaactatgattccaaaattccagagaacagtgagtttccatttgtctcattaaaggagccacgagttcagaataacctcaaaaggttggacactttggaatttaaacaactcattcatatagagcaccagcctaatggaggtgcatcggttatccatgcctacagtaacgaactctcccacctgtctcctatggagatggagaggtttgcagaagagtttgtgggtctagtgttcagtgaaaatgaaaactctgcagctttctacgtgatgggtattgttcatggggcagctacttatttacctgactttttagactatttttcatttaattttcccaattcaccagtgaaaatggagatattgggaaagaaagatatagagacaacgactatgtccaattttcatgctcaggtaaaaagaacgtattctcatggtacttacagagctggcccaatgagacaaataagcttggtgggagcagttgatgaagaagtaggagattatttccctgagttccttgacatgttggaagagtcaccatttttaaaatgtacactgccatgggggacgctatctagtctaaaattacagagtcgaaaagatagtgatgatggtcccatcatgtgggttcgtccaggagaacaaatgatccctgtggctgatatgccaaagtcacctttcaaaaggaaaagaactaccaatgaaataaaaaatcttcagtacctacctcgaacaagtgagccccgtgagatgctctttgaagacaggacaagagctcatgcagatcatataggacaaggttttgaacgacagactacagctgctgttggagtgctgaaggctgtgcactgtggagagtggcctgatcaaccccgtataaccaaagatgtaatttgttttcatgctgaagatttcttagaagtagttcaacgaatgcagttagatttacatgaacctccactgtcccagtgtgtccaatgggttgatgatgcaaaactgaatcaactgaggagggaaggcattcgctatgccaggattcagctatatgataatgacatttattttattccaaggaatgttgttcatcagttcaagacagtttcagctgtatgcagtttagcatggcatattcggctcaaattatatcactcagaggaggacacttctcagaatacagctactcatgaaacaggcacatcatcagattccacatcatctgttcttggacctcacactgacaacatgatttgtgctgtaagcaaagcctccttggattctgttttttcagataaacttcattctaaatatgaattacagcagattaaacatgaacctattgcatctgtaagaatcaaggaagaacctgtgaatgttaatattcctgaaaagactacagcactgaataatatggatggcaagaatgttaaagcaaaattggatcatgttcaatttgcagaatttaagattgacatggattctaaatttgaaaatagcaacaaagatttaaaggaagaattgtgccctggaaatctaagtctagttgatacaaggcaacacagttcagcacattcaaatcaagataaaaaagacgatgacattttgtgctaaatttgcatataccatctaaaatccttttttaaaaaaatttaatgtaataaagattcatgaattctgaaagcaagccaaggacttgctcctatgtctgttacaaaacatagtttatgtagctttgtaacattcctcagtgcctgtccataactgtgaagtattaagcacttagggccagatgcactgtaaacattgcaggtttaaacataaaggagtctttaaaaaaaaatcatttacgttggaattttaggttttagaatagagctgacattaacatatatatatatatataaatatatatatatattttgtaatatgagccagaattctttttcaacaatttaaagcttttccatagagcttatttatatccttttttttcattttaaatgtgtcagcactgtagtgtaaatagcttttaaatatctttttagtgtgatttatactgaaatgtgagccacttaataaaggttcatatgttcatattaataaatatgttttctgttgagtctgtaaagacaaactgacaattcatttaagtcatttgataatgattctctgctggtatatctatttagtgtggtattgtagtgcaaatgtacgtaattcaaatctagtaaatatttaagttcctc

SEQ ID NO: 6890 - DNA, 2801 bp, Homo Sapiens
  NM_198471
gggctcgggtgcgggcgcggctggggctgcggcttcagggtgcctctgacagctgctgcaggaaacatggccaagtttgccctgaatcagaacctgcccgacctgggcggcccccgcctgtgcccggtccccgccgccgggggcgcacgcagcccgagctcgccctactcggtggagacgccctacggcttccacctggacctggacttcctcaagtacatagaggagctggagcgtggccccgctgcccgccgcgccccgggacccccgacctcgcgccgtccccgcgcgccccggcccggcctcgcgggcgcacgtagcccaggcgcctggacatccagcgagtccctggccagtgacgacggtggagcaccgggcatactctcccagggcgcgccctcggggctcctgatgcagccgctgtcgccgcgcgcgcccgtgcgcaacccgcgcgtcgagcacacgctccgggagaccagccggcggctggagctggcgcagacacacgagcgcgcgcccagccccggccgcggggtcccgcgcagcccacgcgggtccggccgcagcagccccgcccctaaccttgcccctgcttcgcccggccctgcccaactgcagctggtgcgcgagcagatggccgcggcgctgcggcgcctgcgcgagctcgaggaccaggcgcgaacgctgcccgagctgcaggagcaggtgcgcgcgctgcgcgccgagaaggcgcggctgctggccgggcgcgcgcagcccgagccggacggggaggctgagacgcgcccggacaagctcgcccagctgcggcggctcaccgagcgcctggccacctccgagcgcggcggccgtgccagggccagcccccgggctgacagcccagacggcctggctgcagggcgcagcgagggcgcgctccaggtcctcgacggggaggtcgggagtctcgatgggacgccccagacccgggaggtggccgccgaggccgtgcccgagacccgagaagcgggtgcccaggccgtgccggagacccgggaggccggcgtggaggctgcccccgagaccgtggaggcggacgcgtgggtgaccgaggcgctgctggggctgcctgcggccgccgagcgcgagctagagctgctgcgcgccagtctggagcaccagcgcggggtgagtgagcttctgcggggccggttgcgggagctggaggaagcccgcgaggctgcggaggaggcagcggcgggggcccgggcccagctacgcgaggccaccacccagaccccgtggagctgtgccgaaaaggccgcgcagaccgagtccccggcagaggcgccctccttgactcaggagagctcgcccggatccatggacggagacagggccgtggcgcccgcgggcatcctcaaatccatcatgaagaagagagacggcacacctggtgcccaacccagctccggacccaagagcctgcagtttgttggggtcctcaacggagagtacgagagctcctccagcgaggacgccagcgacagcgatggcgacagcgagaacggtggcgccgagcccccgggtagctcctcgggctccggggatgacagcggcgggggatccgactcgggcacccctggccctcccagcggcggggacatccgggaccctgagcccgaggcggaggcagagcctcagcaggtggcacaggggaggtgcgagctgagcccgcgtctgagggaggcgtgcgtagcgctgcagcggcagctgagccggccccgcggagtagccagcgacggcggcgcagtgcgcctcgtggcccaggagtggtttcgagtgtccagccagcggcgctctcaggcggagcccgtggccaggatgctggaaggggtgaggcgcctgggacccgaactgctggcgcacgtggtgaacctggcggatggcaacgggaacacggccctgcactacagtgtgtcccacgggaacctggccatcgcaagcctgctcctggatacgggggcctgcgaggtcaaccgccagaaccgagccggctactcggccctcatgctggctgcactcacctctgtgaggcaggaagaggaggacatggctgtggtccagagactcttctgcatgggtgatgtcaatgccaaggccagtcagacggggcagacagccctcatgctggccatcagccatggccgacaggacatggtggcaaccctactggcgtgtggggctgatgtgaatgcgcaggatgcggatggggccacagcgctgatgtgtgccagtgagtatgggcgcctggacaccgtgcggctgctgctcacccagccaggctgtgaccctgccatcctggacaatgagggcaccagtgccctggccatcgccctggaggctgagcaggatgaggtggccgctctgctacatgcccacctgagctcgggccagcccgacacccagagcgagtcaccccctggctcccagacagccacacctggtgaaggagaatgcggtgacaatggagagaacccccaggttcagtaagctgcctcgtctggctcactacacctagctgtggggagatctcctcgtcagtcacctcagcctttggcgcacagaagggtccagggtcccctgctcagaggctaacactggccgaagagaaaggcaatttcagttggggtgactgtggcaggaaggggctcactctggccccaccaaggtgaggtggggaccaagtgatagagccctgatccacccactctctgaaacttctttgctaataaaacattcctactaaaaaaaaaaaaaaa

SEQ ID NO: 6891 - DNA, 768 bp, Homo Sapiens
  NM_198472
cgccccgtctgccgggccatggtggcgctgaagggtgtccccgcactgctgtcccccgagctgctctacgcgctggcgcggatggggcacggggacgagatcgttcttgcggacttgaacttcccggcctcctccatctgccagtgtgggcccatggagatccgtgcagacggcctgggcatcccgcagctcctggaggccgtgctgaagctgctgcccctggacacctatgtggagagtccggctgcagtcatggagctggtgcccagcgacaaggagaggggcctgcagaccccagtgtggacggagtacgagtccatcctacgcagggccggctgtgtgagagccctggcaaagatagagaggtttgagttttatgaacgggctaagaaggcttttgctgttgtggcaacgggatgctgaagcagggtctcggcaccctggccctgcagcccagctcagtgctgggcttggctcctctgcagggagacggccctctacggaaacctcatcctcaggaagggggtgcttgccctcaaccccctgctgtaggcctggtgaagaccacctgggccggaagaggaactgggggcaccctgagctccagtaccaccactcacaacaggcctcccagtggcagctcccagacctgggccctggccagggctctaggggccggcagtcttggggtgggccctgccaattgggacgagtatccctgatttgtgaaaatgatggaaaaacgttcagtctcaagagtccaattcc

SEQ ID NO: 6892 - DNA, 1034 bp, Homo Sapiens
  NM_198481
gtgagaaggaaactgcaagagtggggcagagaaccagagtgtcagagcaaaacctcctctatctgcacatcctggggacgaaccgggcagccggagagctgcggccggcccagtcccgctccgcctttgaagggtaaaacccaaggcggggccttggttctggcagaagggacgctatgaccgcagaattcctctccctgctttgcctcgggctgtgtctgggctacgaagatgagaaaaagaatgagaaaccgcccaagccctccctccacgcctggcccagctcggtggttgaagccgagagcaatgtgaccctgaagtgtcaggctcattcccagaatgtgacatttgtgctgcgcaaggtgaacgactctgggtacaagcaggaacagagctcggcagaaaacgaagctgaattccccttcacggacctgaagcctaaggatgctgggaggtacttttgtgcctacaagacaacagcctcccatgagtggtcagaaagcagtgaacacttgcagctggtggtcacagataaacacgatgaacttgaagctccctcaatgaaaacagacaccagaaccatctttgtcgccatcttcagctgcatctccatccttctcctcttcctctcagtcttcatcatctacagatgcagccagcacagttcatcatctgaggaatccaccaagagaaccagccattccaaacttccggagcaggaggctgccgaggcagatttatccaatatggaaagggtatctctctcgacggcagacccccaaggagtgacctatgctgagctaagcaccagcgccctgtctgaggcagcttcagacaccacccaggagcccccaggatctcatgaatatgcggcactgaaagtgtagcaagaagacagccctggccactaaaggaggggggatcgtgctggccaaggttatcggaaatctggagatgcagatactgtgtttccttgctcttcgtccatatcaataaaattaagtttctcgtcttaaaaagaaaaaaaaaaaaaa

SEQ ID NO: 6893 - DNA, 1293 bp, Homo Sapiens
  NM_198486
gaaagatggcggagcaagagcaaagaaaaatccctttggttccagaaaatctcctgaaaaagaggaaggcttatcaagccctcaaagccacccaggcaaagcaggcacttttggcaaagaaggagcagaagaaaggaaaagggctcaggtttaagcgactggaatcattcctacatgattcctggcggcagaaacgtgacaaggtgcgtctcagacgactagaagtgaaacctcatgccttggaattgccagataaacattccttggcctttgttgtacgcatcgaaaggattgacggcgtgagtttactggtgcagagaaccattgcaagacttcgcctaaagaaaatttttagtggtgtctttgtaaaagtcaccccccagaatctaaaaatgctgcgtatagtggaaccttatgtgacctggggatttccaaatctgaagtctgtccgagaactcattttgaaacgtggacaagccaaggtcaagaataagaccatccctctgacagacaatacagtgattgaggagcacctggggaagtttggcgtcatttgcttggaagacctcattcatgaaattgccttcccagggaagcatttccaggagatctcatggttcttgtgccctttccacctctcagtggcccgtcatgctaccaaaaatagagtgggcttcctcaaggagatgggcacacctggctatcggggtgaacgcatcaatcagctcatccgtcagctgaactagacccaggtgaggcagggctgaaaactgcccttgggctgacttttgataggccatgccttgccactttacaagttctttttgcatttactagtatttaagagtaaccttgagattgggaggaatagaggaggctggtacaaatagatggagacctgctgggatcagtgaatgcctgattaggacatggggctatgcatagcctaagagttataggcttaaagatgtcgagtaactaaaaactgtattgctggccgggcgcggtggctcacgcctgtaatcccagcactttgggaggccaaggcgggcagaccatgaggtcaggagattgagaccatcctggccaacatggtgaaaccctgtctctactaaaaatacaaaaatgagctgggtgtggtggcacgtgcctgtagtcccagctactcgagaggctaaggcaggaaaatcgcttgaacccaggaggcagagattgcagtgagccaagattgcaccagtgcactccagctgggcgacagagcgagactccatctcgaaaaaaaaaaaaaaaaaa

SEQ ID NO: 6894 - DNA, 1202 bp, Homo Sapiens
  NM_198489
gccgccggatggcgtaggatcggccgctggtggtggtgataccgggtacccgggctatggcgccggcgcagcgctgccctctgtgccgccagaccttcttctgtggtcgcgggcacgtttacagccgcaagcaccagcggcagctgaaggaggctttggagaggctcctgccccaggtggaggcggcccgcaaggccatccgcgccgctcaggtggagcgctatgtgcccgaacacgagcgatgctgctggtgcctgtgctgcggctgtgaggtgcgggaacacctgagccatggaaacctgacggtgctgtacggggggctgctggagcatctggccagcccagagcacaagaaagcaaccaacaaattctggtgggagaacaaagctgaggtccagatgaaagagaagtttctggtcactccccaggattatgcgcgattcaagaaatccatggtgaaaggtttggattcctatgaagaaaaggaggataaagtgatcaaggagatggcagctcagatccgtgaggtggagcagagccgacaggaggtggttcggtctgtcttagagcctcaggcagtgccagacccagaagagggctcttcagcacctagaagctggaaagggatgaacagccaagtagcttccagcttacagcagccctcaaatttggacctgccaccagctccagagcttgactggatggagacaggaccatctctgacattcattggccatcaggatataccaggagttggtaacatccactcaggtgccacacctccctggatgatccaagatgaagaatacattgctgggaaccaagaaataggaccatcctatgaagaatttcttaaagaaaaggaaaaacagaagttgaaaaaactccccccagaccgagttggggccaactttgatcacagctccaggaccagtgcaggctggctgccctcttttggccgcgtctggaataatggacgccgctggcagtccagacatcaattcaaaactgaagctgcagcaatgaagaagcagtcacatacagaaaaaagctaatcatgctctctaccaactaccatgaggctaaaagcaaagtcaacaaacccctattataccttccaccaaattctttatcattgtctttcttaggaaacagacatactcattcatttgatttaataaagttttatttttccaaatgta

SEQ ID NO: 6895 - DNA, 4447 bp, Homo Sapiens
  NM_198490
ggccggagctttgcggagggcccggcttggcgggtccgggggggagccgaacccgcggggcaccgggtccgggcggggccgagccgggccggggcgggagccagccggggtggggcggggccgaggccgaggcaggcggtcggcagtgctgggggttcaggtgttgcggcggctccacgtagccaggcggcccgtgggctggagcgggcggagctcggcccgcggcttgcgtgagctcaggccggtcccagcgtccagagcgccggcccttcggcttcttctaggccatggcagggccgggcccaggcccgggggacccggacgagcagtacgatttcctgttcaagctggtgctggtgggcgacgcaagcgtgggcaagacgtgcgtggtgcagcgcttcaagaccggcgccttctcggagcgccagggaagcaccatcggcgtcgacttcaccatgaagacgctggagatccagggcaagcgggtcaagctgcagatctgggacacggccggccaggagcggttccgcaccatcacccagagctactaccgcagtgccaatggggccatccttgcctacgacatcaccaagaggagctccttcctgtcggtgcctcactggattgaggatgtgaggaagtatgcgggctccaacattgtgcagctgctgatcgggaacaagtcagacctcagcgagcttcgggaggtctccttggctgaggcacagagcctggctgagcactatgacatcctgtgtgccattgagacgtctgccaaggactcgagcaacgtggaggaggccttcctgagggtggccacggagctcatcatgcggcacgggggccccttgttcagcgagaagagccccgaccacatccagctgaacagcaaggacatcggagaaggctggggctgcgggtgctgaccaggggccgggccggcagactgggggttccccacctccttgctctccccagcctgccaagcccagccctccagagccagccctcctgggtaccggcaactacagcagccgggtgaagctctggagctctgcatcctgtggcctggctgcgggatggaggctctccttgaggaaggggaagcaggataccctggcgggccaccctgccagccagcagctggccctccaccatcttcacattccaagactggcctgaacccgccggtgtgggccacagtgggaggggccagcagtcctccctgtcccatgcctgctggctctgaccgtttcctctcatgggtttgctttacctgtggcagcaggttgctgctttccagggatgtgtccagtgccctgggttcttcccggtcatcctggggctctgcacagagcagcagagctagagccatgagacccacagacttggtgcctgagcgcagctccagggaagccccagccccttccaggcggggaacctgcttcctgccttcactgcccccgcagcactcacagacatctccctggggtctggctcactgccttatcaggacctctgagttttctgactttctgtgtagcttctcattttcatcagcacagcatggggtcacggcccacagctaggtggggtcacggcccacagctaggtggggactgtctgctggctcagggcccagtgttttgccactcaggttgcaaaattagctaatccttcagtgccagcactcagaagtctggcaggtgggggaatgagatgagaaagtggacatttaaggtccaagtagaagcttgcatccttgaggctcagggatgagagggcaccgcaaggcacccagccttaccccacaagcaggaatcctgccagccgagcgtgggtcccagtctatggaatcgagtctcccagacaaaaaaggagaggccctggcggtccttggcctggcccattttattccctggacccttaactgcctcaccctgagctgggcaccaaagttagaaggcaaaagtggggtagggggatgtgggaagcagcattgtcctctgggcatgtggctcagaggtatcacagtgacaaaagagccagggctagggctggaggggccaggtgatcttccttagccaatcccagtccgtctgtgtcagcccagctctgcctcgcagccccctcagcatgggtgcccccagaagtaagcagctcttggacccacgagcagggctgcgtcggtttgtggtctagctcccagggccaggccaggcatggctcagtgcagtccctgggccagtgagaggcctcccccatgcctccctgccctctgcactaagcactttccaggcaggcctggccatagggcaagagcaggccttacagcagtgccacggtgacccaagaggcagggttggggcctggacaggggttcctctgctgagactgagacaagcagggcttgatgctggtggtggagccagcatctcacctgccaggcttccttttgggcagggaggctacctgtggaatggctgagcctggttctgcaggggaggaaggctgccaggagctgaggggctggcacctgcattgaggggagtctgggtgcatcagattggggggcgccagaggcgaggctgcctggctccctttctcagcagctttgcttgtggcaggggtgagagtggagctgagtggggtctgggctctgcccctgcgcctccactgcagtgcctgggctccccttgcagggcagacagtgcctggcactgaggggtgcccccagaccccgctgggactggatgtgccgtgggcagtgccttcctccagcctcacaacctttctgctggggctgaagtttctggggtcacatggtcagaaggggctgagctggtctttcactgcaggcccactctgaaagagaaatcccatgaagcctgtccttgcagagcccctctgtttttgggggaacagggagcattcacagggtcttgggaacaaaggcctgggcctccccgtttgaatttcagccccagttccagggcaagtcccagccacccaagcatacttaccagtactgcccaccaccacccactgcccacctctaagaagcccggctctcctactctgcttccaggctggggcctcacaggtggggctgttaccttcctcagggcttagggagggagggaggacatggacagggccttccaccctggctccttcacagggatggtagctgaccggtgatgggttcatttgtcaccttggactgtgagccacttccacttctcgccccccaggcaggagcaccctcactccaagggcttggcctggaaaggcaggctcacctgggactcaacgttccttcccccgccgccactgtgccccccgtccctccaccccagaagccctgacctcatttgggcaccttgctgtcctctgggcttctcctctgcccaggtcaccctgtggcaggcctgggccctcaggatgtttcaaaggctccacagctccaccgctccacctggcttcactccagcaccctgtccctggagcacctctgtcctgtctgggccaacctggtctccctgccccatgccctcccctggctcttagcaacctgcccttttattcatgccatttggggtcacagatgcctagctggacacagctcccagaactggctccaccctggggccttgcccctagtaccccctggcaggagcaacccaccccatggtcgaggttcccctacccctggatcctggactgaagccatttcctacagagaagcgttcccaccccctctcaggcacaaaagccggtgtccagggactcaagacctgtacctggggttgcaggggctcctgccctgctgtatcccaccaggagggggccccactgcccttccggcccttaaaactgggctgggagtgaagacggggaagtgtgtgagacaaaacaaagccggcttgtttcctccccttggcaggctaagctctcccggcagcccgggctctggggcggaaggagaacagtgtcatctcttcctttgttgataaattgccaaagagtgggaacaggtggggtcaggggccagagtgcaggggagggggcaatggtggaggtggcggggggaagcagagggaggtgggctgaggcctcggtggggccagtgcgacgctggcttaaggagctggaggggttcctaatacacatttaattcagtttctcttccctaagaggctgccggagttggggcctcctccagcagagaccctcggacccctgcagggcctggacttggggtgaacagggcttcagtcagcgcaagtattccatttgcatttggtaatttttcatgccacctatttatgaatatataaatctttataccaaatctattttttaaaacatggaaaagttgcctttatggaaacttggcagagccagagtgtacacattcctaaaccattaaacagatttctataac

SEQ ID NO: 6896 - DNA, 1260 bp, Homo Sapiens
  NM_198507
gactagttcccctggcgtttggtcacctctgcttcattctccaccgcgcctatggtccctcttggagccagcgtggcgggcctggcggctcccgggtggtgagagagcggtccgggaacgatgaaggcctcgcagtgctgctgctgtctcagccacctcttggcttccgtcctcctcctgctgttgctgcctgaactaagcgggcccctggcagtcctgctgcaggcagccgaggccgcgccaggtcttgggcctcctgaccctagaccacggacattaccgccgctgccaccgggccctacccctgcccagcagccgggccgtggtctggctgaagctgcggggccgcggggctccgagggaggcaatggcagcaaccctgtggccgggcttgagacggacgatcacggagggaaggccggggaaggctcggtgggtggcggccttgctgtgagccccaaccctggcgacaagcccatgacccagcgggccctgaccgtgttgatggtggtgagcggcgcggtgctggtgtacttcgtggtcaggacggtcaggatgagaagaagaaaccgaaagactaggagatatggagttttggacactaacatagaaaatatggaattgacacctttagaacaggatgatgaggatgatgacaacacgttgtttgatgccaatcatcctcgaagataagaatgtgccttttgatgaaagaactttatctttctacaatgaagagtggaatttctatgtttaaggaataagaagccactatatcaatgttgggggggtatttaagttacatatattttaacaacctttaatttgctgttgcaataaataccgtatccttttattatatctttatatgtatagaagtactctgttaatgggctcagagatgttggggataaagtatactgtaataatttatctgtttgaaaattactataaaacggtgttttctgatcggtttttgtttcctgcttaccatatgattgtaaattgttttatgtattaatcagttaatgctaattatttttgctgatgtcatatgttaaagagctataaattccaacaaccaactggtgtgtaaaaataatttaaaatttcctttactgaaaggtatttcccatttttgtggggaaaagaagccaaatttattactttgtgttggggtttttaaaatattaagaaatgtctaagttattgtttgcaaaacaataaatatgattttaaattctcaaaaaaaaaaaaaaa

SEQ ID NO: 6897 - DNA, 1544 bp, Homo Sapiens
  NM_198508
gagagcgaagctcctctgcactgggcccaggtgcgctcctcagcgtctccgggtggcggggcgcgcgggatggaggagtcttgggaggctgcgcccggaggccaagccggggcagagctcccaatggagcccgtgggaagcctggtccccacgctggagcagccgcaggtgcccgcgaaggtgcgacaacctgaaggtcccgaaagcagcccaagtccggccggggccgtggagaaggcggcgggcgcaggcctggagccctcgagcaagaaaaagccgccttcgcctcgccccgggtccccgcgcgtgccgccgctcagcctgggctacggggtctgccccgagccgccgtcaccgggccctgccttggtcaagctgccccggaatggcgaggcgcccggggctgagcctgcgcccagcgcctgggcgcccatggagctgcaggtagatgtgcgcgtgaagcccgtgggcgcggccggtggcagcagcacgccatcgcccaggccctccacgcgcttcctcaaggtgccggtgcccgagtcccctgccttctcccgccacgcggacccggcgcaccagctcctgctgcgcgcaccatcccagggcggcacgtggggccgccgctcgccgctggctgcagcccggacggagagcggctgcgacgcagagggccgggccagccccgcggaaggaagcgccggctccccgggctcccccacgtgctgccgctgcaaggagctggggctggagaaggaggatgcggcgctgttgccccgcgcggggttggacggcgacgagaagctgccccgggccgtaacgcttacggggctacccatgtacgtgaagtccctgtactgggccctggcgttcatggctgtgctcctggcagtctctggggttgtcattgtggtcctggcctcaagagcaggagccagatgccagcagtgccccccaggctgggtgttgtccgaggagcactgttactacttctctgcagaagcgcaggcctgggaagccagccaggctttctgctcagcctaccacgctaccctccccctgctaagccacacccaggacttcctgggcagatacccagtctccaggcactcctgggtgggggcctggcgaggcccccagggctggcactggatcgacgaggccccactcccgccccagctactccctgaggacggcgaggacaatctggatatcaactgtggggccctggaggaaggcacgctggtggctgcaaactgcagcactccaagaccctgggtctgtgccaaggggacccagtgatctgggctctgcctggtcctcagcctgccaggcagatgcagcaccccctacaggggaggccagttgagagcttgggcagcctcttcctggacccagttatccaggtcttcatgctctgctcaagggggccacatgagcgagcctaggagctggacttcaacccaggaagatgcatccgagggaaaggagattttctatggcctcaggcctgagtgccaatattagtctccagcttctgtggatga

SEQ ID NO: 6898 - DNA, 3256 bp, Homo Sapiens
  NM_198513
gctgacgtcgccggggcccggcgtcgcgtcagggctggccggcggcggaggcggcggcggcggcggcgatggcagcggaccctgagcgagcttgagggctcggacccagctccctcccgcgaaaccttgggcggatccggcgctgcggccccagctcgctccgctcctgctccctccccggccgctgcctgggcggaggcagaggcagaggcccgggctggccgccctgctcgtgccccagctcggccccggacggcccggctgctgtgcagagaggaggccgagtcgtgaaaagagaatactgaagaataggatctcaagatgagtaaaaagcccccaaatcgccctggaatcacttttgagattggtgctcgtttggaggcactggactacttacaaaaatggtatccatcacgaattgaaaaaattgactatgaggagggcaagatgttggtccattttgagcgctggagtcatcgttatgatgagtggatttactgggatagcaatagattgcgaccccttgagagaccagcactaagaaaagaagggctaaaagatgaggaagatttctttgattttaaagctggagaagaagttctggctcgttggacagactgtcgctattaccctgccaagattgaagcaattaacaaagaaggaacatttacagttcagttttatgatggagtaattcgttgtttaaaaagaatgcacattaaagccatgcccgaggatgctaaggggcaggattggatagctttagtcaaagcagctgctgcagctgcagccaagaacaaaacagggagtaaacctcgaaccagcgctaacagcaataaagataaggataaagatgagagaaagtggtttaaagtaccttcaaagaaggaggaaacttcaacttgtatagccacaccagacgtagagaagaaggaagatctgcctacatctagtgaaacatttggacttcatgtagagaacgttccaaagatggtctttccacagccagagagcacattatcaaacaagaggaaaaataatcaaggcaactcgtttcaggcaaagagagctcgacttaacaagattactggtttgttggcatccaaagctgttggggttgatggtgctgaaaaaaaggaagactacaatgaaacagctccaatgctggagcaggtatgaaatggtagcatttgatttttttcaaggttcccactggaatgatcacggagctctagtatctacgtaattgaaattccccttttgatcagatatgggaataggaagctaattaattgatgatatatttttaactctgccttctccaaggtatacagataactacagacttcattagtgtttgatttcatagactggcattaaagcctttgtctccaaaatttgaaggcctggagacaggcatcccagggtataagcttccagctggatcacctttaactagcttacaaaaagacccttacacaaatactttccatttgtgagttaaaacagggttttttgacatcgaataaagcttcttttgtaagaagtttcttttatattgtaacaattggtgttgttagactgactatgtgttttatgaattgatcaatgagccatacatttttgctaggatgtatattttaataactacaaaaaaagagagtttaaaaaactattaagggtctgtctttaaaccacctaatagaggaatttaaaagtgaaggttgcagttgctagattttgccttggctaccttcagattcccacaatacttgtacataatgaactgtgcatgcttttacattctctaagggcttaacttcttaggcactgtaagactataagaacgcagtaatagccataactggatttccttggttctcctgttttaaaatctgagccttaatgtagttttaatatatcctttttgtattacttttctttattagtagcctaataaagaagactttgagtatcttttgctctcctctagatgcgttttaaaaactattccaaatttaattgatattgtattgagtttttcagggttattttaggcctgatttgataacaatgcgttgttttggtgcctccattaatgttgtattaaatcaatgggtcttttaaattgattaatatgtcattgaatcataccttctgattttctgtgatcatccaacggttaagtctttgccgttattgtcaatatatcaaccaaattttaaataactttttttactgtgtattactatattcaacgtcccagatataacaatattttgtattttcaccactgtttatggtattctcagaatgcgataaatcagggacttgggtaataaaatgtttctggaaaattcattacaatgtcaatctttgattatgcacaatcctgctgaggtgaatgtgattgtgaaaagtacttattaaatgtggaagttagtgtagagggcagtacccgtcttagagagaagtacagaaaaccacgttttgaaattgaatttaaaaaagaaaggaaaattgtgtaactcggctgtttctattttcataattaaaaacttttgagagtccttgccagttttgtaacaaagagaccaacaatcattaatgaaaaccttgtaaattattttagattttcaggaacaccatgccattccctcattttctacttgtcattcaggttgatttcaatgtgaaaatgttttgtgaacaaacacttatttttatcctatgtgttagcctcgcttcatagttaaaaagccgagttataaagctcttaattacatctcaattggtatcagcaatagacctaaaggagaggtattgattgttactaacctctgtttcctaatgagttaaagtaatgtcactcatgacatagattgataacaggcctgtagtcaaaacttactgtgctaatggacttatttatattttttaaaaattcaaactgtggtcttgaaccccaattctcagcttattaattatagattatttaattgtattagggatatgtcatgttatatttacttttggataaaacttgcattagatgcataataactcagtaagttttaaaaacaatgttaatttttccttgtttagaagttaagcaccttatcaagatattaagttttaaaatcttgttttataactttgtaacttgagagtaatggatgctgtagtgatgtctttcacatatgtgaagatgaacaataaaattgtttatttacaagtaaaaaaaaaaaaaaaaaaa

SEQ ID NO: 6899 - DNA, 6409 bp, Homo Sapiens
  NM_198514
ccgaaaaggggcggggtgggtcggacggcagtttaattacgtccccgggaactgcgccgatttggacttttggcacttggacctatgctttaaaaagaaaaaagtgtcattggcgtggagtggggctagtggagggtgaggtgaatgcgccgtttggaaaccacaggacagtgaacgtttcgtctctcccagcgagactctcccgcgggcccggcggccgcatcgggagcccggcggaaacatggcggcgcccggaggccggggccgcagcctctccggcctgctccccgcgcagacctcgctagagtacgccctgctcgacgccgttacccagcaggagaaggacagcctggtctaccagtatctgcagaaggtggacggctgggagcaggacttgtcagtacccgagtttccggaaggattagaatggctgaacacagaagaacctatttctgtctacaaggatctatgtggaaaaatagtcgtccttgatttcttcacctactgctgcataaactgtattcacctattgcctgatctccatgcattagaacacacatactctgataaagatggtcttcttattattggtgttcactcggctaagtttccaaatgaaaaagtcctggataacattaagagtgctgttcttcgatacaacatcacccaccctatggttaatgatgcagatgccagcctttggcaagaactagaagtttcctgctggccaactctagtcatacttggacctcgtggaaacatgttgttttctttgattggagagggacacaaagataaattatttttatatacttcaattgctttaaagtattacaaagacagggggcagatcagagataataaaattggaataaaactctataaagattctttgccaccttcaccattgctatttcctggcaaagtaacagtagaccaagttactgatagattggtaatagcagacactggacatcatagaattttggtcgtttggaagaatggacaaattcaatatagcattggaggacccaaccctggaagaaaagatggaatattttcagaatcaacttttaattctccacagggtgtagccataatgaataatatcatatatgtggcagacactgaaaaccaccttataagaaagattgacctagaagctgagaaggtgagcactgtagctggtattggaattcaaggtacagataaagaaggtggagcaaaaggagaacaacaacccattagttccccttgggatgtagtttttggaacatcaggttcagaggtccaaagaggtgacattttatggatagccatggcagggactcatcagatatgggcactcctgctggactctggcaaactgccaaagaaaaatgagttaacaaaaggaacctgccttaggtttgctggaagtggaaatgaagagaatcgaaacaatgcctatcctcacaaggcaggttttgcccaaccttcaggcctttccttggcctctgaagatccctggagctgcttgtttgtagcagatagtgagagcagtacagtgagaaccgtttcactgaaagatggagcagtgaagcacctcgtaggaggagaaagagaccccatgaatttatttgcttttggtgatgttgatggagtaggaatcaatgcaaagcttcaacacccccttggagtaacatgggacaaaaaaaggaatttactttatgttgcagactcctacaatcacaagattaaagttgtggatccaaaaacaaaaaactgtacaacattagcaggaactggagacacaaataatgttaccagttccagttttacagagtcaacttttaatgaaccaggaggcttgtgtattggagagaatggagaattattatatgtagcagacaccaataatcatcaaattaaagtgatggatttagaaactaaaatggtatctgtgctccccatcttcagatctgaaaatgctgtggtagatggcccgttcctagtagaaaaacagaagacattacccaaactacctaaatctgctccaagcattaggctttcccccgtgactgcgtgtgctggccagactcttcagttcaaactcagattagacctcccatcaggatcaaagctaactgaaggagtatccagttgctggtttctaacagctgaaggcaatgaatggctacttcaaggacagatagcagctggagatatagagaacatttccagtcaaccaacaatttcactacaaattcctgatgattgcttatcacttgaagccattgtatctgtcagtgtgtttctttattactgtagtgcagacagcagtgcttgtatgatgaaggcaattttgttcagtcagcctttacaaataacggatacacagcaaggttgcatagctccagtagagctcaggtatgtattttagccagccagctagctagcaacccattgccaccacctactgtctcccatcctgactatcactgtaatttaaggaaagaaaacttcagttctgcctctggataccaagatgcccattgctcagttcagacaactgatattaaaataaagctatgctccttacttacttcttttattataaacaaattcctttgctttggctgatactagctgagtcattgatcatcattggtaccatgatattgtaatctatgctgctatttggcacaagactgaagttcacactacagtagagaatactataagataatttgcaataaatactgataataataataccagatattttaactaactttttctacctttattaatagcaatcagcacacttgaatgtgtaaatttcacagtaactttaggcagaacttaagctccaggccacatttgtataagaacaccaagtattcaaggcataaagtctgttgtaagccaaaaaaaagtcttttcatcactgtagaagcttaaggagtacatcagtggtaaatacgatctttattctcttctgtggttttctcagttgagatatttttaaaagagagttttgatctatttttattataaattatttgttatttaacataccattatgaatgccttaaaactttgtacagataaagttggacatagaatctctaaggactgactcctttaactgtttttgagtgactacattaccagataatgaatgagtccccagaaatattatgactttcaaggaaaaagggactttaggacacattacttagtgtctgtgataaataatttattgtgacagctaaatctgatggttacatatcttgttttggaaatgtacatttcacttgtaagcattaaatgcagatttgttgagtttaggttttgaggtttttttcgttcccatattcagaatttaaattatgatcatttattgtgatgtttttaaaaatcacttttaagccttaaaagtgaaattttcagtgtgaggtgctttcatgctattaatagatacagtatatcctaatatattagtcttcaaaatattaaggccgaaacagtgatttaatgatactattttttaatttttgttgttttttatccctaaaaaaagatattggaaaggttttttttctattgtcataatttataactacttaaaagcctaatcttgttttccttaagacctattcaacatgtttgtgatttaatcagcttacaagggtttaaaaacatcaggtgaaccatgtttatttattcagtaaatatttatagacaatatggcataatatgcttcccttccctgtaaaaacagtgctaaatttgaagtgtaatcttttttaaacatcattgtctatttttaattttgtttgaaatgtagtattagtttgttttattcataaggttagctgaatctctgaagtaaggatgtataaatcatgacattgatttaattagtcatctactgaagctacttttaaagagaaatatagatataaaattaaaaggaatcctgtttaaaattatatgtaattacctcataaaccttttctctccacaagcaatcaaaaaaatgaaatgttctgtaataaaagggtgtataacatactctcttttatgagaataggccttagttattttattttatttttgagacgtagtctggctctgtagcccaggctgggagggcagtggcgcgatcttggctcactgcaacctctacctcctgggttcaagagattttcctgcctcagcctcccaagtagctgggattacaggcgtacaccaccatgcccagctaatttttttgtgtttttagtagagacagggtttcaccatgtcagtcaggctggtcccaaactcctggcctcaggtgatccgcctgcctctgtctcccaaagtgctgggattacaggtgtgagccaccttgccctactggccttagttaatttttaatctcatttgacttattatgtttctcatttctagatggacaggatgagaatattttggcccaatcattttctgtttaaggacttaaacaatttcacactctaaatgaagtatatacaattttaatttactaatttagaaatatctgagtttatttttcaatataatatacaaacacagtgtttgttatacatgttcatgtacagtgaaaatgcaaaggcattttttagactctattccccttcatttgtctagacagttttaggttagccttagcttatacttttcttgactttcaaaatacagttttattgaacattcttattcttacccactgccagtctgcattgttttttacattaaaagtattatttatagtagactaatatgattttgaataaaatcacacttaagcaatatagataggttcctagaatttatgacgaggataaacctctcacataagaggaagcactagaaagtttatttttaaaacttgttgatccatattctataaggactaatgcatattttttatcttttgcttttcttgttggataaattattatgtccagtgatagtttaaaaagaacaagattttagtgtaagtcacctcacttgaaatgccagtaatgtggtattacacacattttatataatacctggaatctttgccctaaattattctgctggtttgtcgctatttttttcctctcctctttattatttcacaaatggtagaatttcttgatatgattcttgtaaagagtttagcttatcttgaacattctgtcttaagcaaatatttaacaagagaaaactttgtagtttaatcacccataagtgtaactttagcaaaattcaatgactatgaaaaataatttttttcttaactgttctaataatatttagttataatattatcaaaccttcagaaagttataaatcctaacagccagaaaaaaaaatttactatgtgtatatttatataggtgtgtgtatacacaaagattaagaattattcatgattcttttatggccaatatacttttgagcttgtataactgagataagttactctttgcttgtttttctgtagttggaaaatttaggaagttattaaaaatacatatctctataatgtaatagttttctgcctgcacaaagtttactattaatttatgtctaccagttaaaaatacgatagttagatttggcatcacgtttaaccacaatcatcaaaatctacttaaattctatagttaacagttacataagaatatatgcagagggaaaatgtcaatagttcttgtgaatgaaggaattatggatgtttttattttaattctactttgctgttttttttttcttttcagtgagcaatctgttatttttaaaatcacggtggggggaaacccataaagtttaaagagttaaagttaactgaatcgtaagcacttatataataactttttaaaagtcatttttattaccagagctcagaacattgtttggagtcctttgatctaccggttctcttaagtacgtgatttcgtgaagatagcaatggttatggcttttttgttctgttatttttattgtgtaacgtagtgtagtggttaagagcttggattttgcagtaacttggattctaatcctttaaaatggggctgatatacctgcctcatattcaatgaaatattgtgtgtacagcacttagtaattaatgaaactggtaattattagcttagttactgtaatgataatttgggaccataaacacatatcaccctacattttctttgcaactacaatttgtgaaggaaaatctcccactaactattggttatgttaatattcttcatagagttgggttcaagaagagaaatgttttataatgaagcatataactattttataaacaacattgtagttataaagaagcatgcctatagtgttattaaaaattttttgtacgactttctggaaaaaaaaaaaaaaaaaa

SEQ ID NO: 6900 - DNA, 1766 bp, Homo Sapiens
  NM_198517
gtgaggtgctgcgggaggccccgggcaccatggcccaggccctgggggaggacctggtgcagcctcccgagctgcaggatgactccagctccttggggtccgactcagagctcagcgggcctggcccatatcgccaggccgaccgctatggattcattgggggcagctcagcagagccagggccgggccacccacctgcagacctcatccgccaacgggagatgaagtgggtggagatgacctcgcactgggagaaaaccatgtcccggcggtacaagaaggtaaagatgcagtgccggaaaggcatcccgtctgccctgcgcgcccgatgctggcccctgttgtgtggggcccatgtgtgccagaagaacagccctggcacctatcaggagctggcagaggcccctggagacccacagtggatggagaccattggcagggacctgcaccgtcaattccctctgcacgagatgtttgtgtcgcctcagggccacgggcagcaggggctcctgcaggtgctcaaggcctacaccctgtatcgaccggagcagggctactgccaggcccaggggcccgtggctgctgtgctgctcatgcacctgcccccagaggaggccttctggtgcctggtgcagatctgtgaggtctacctccctgggtactacgggccccacatggaggctgtgcggctggacgccgaggtgttcatggccctgctgcggcggctgcttccgcacgtgcacaagcacctgcagcaggtgggcgtcggacccctgctgtacctgcccgagtggttcctgtgcctcttcgcccgctccctgcccttccccacagtgctgcgtgtctgggatgccttcctcagtgagggtgccagagtactgttccgtgtggggctgacactggtgcgcctggcgctgggcactgcagagcagcgaggggcctgccctggcctcctggagacactgggagcccttcgagccatcccccccgcgcagctgcaggaggaggccttcatgtcacaggtgcacagcgtggtgctgtcagagcgggacctgcagcgggagatcaaggcccagctggcccagctgcccgattccgcgccgggacccccgccccggccacaggtccgcctcgccggggcccaagccatctttgaggcccagcagctggcaggagtgcgacgaggcgccaagcctgaggtgcctcggattgtggtgcagcccccggaggagcccagaccaccgcggcggaaaccccagacccgcggcaagactttccatgggctcctgactcgggcccggggcccccccatcgaggggccccccaggccccaacgaggctccacctccttcctggacacccgcttctgagaggaccatggacttagtgtcccccagtctcaattgcctgatggctgatgccagcccggcaaataggcaccgcactttactcttgggactcggggacttggcttccttcctggcaaggaccaggcagtggggaaggaggaggtcctccgtggtacatactgggtcaggcactagcatggaggagggtcacagagtggggcacgtgaggacccatggaaccgtcctggtgcccaggccctcacaagtaccaaagccagcaccaaaggagtcagggaaggggttggctgagtcaagggaccccagagggcaccaggaataaaatcttcttgaacagaaaaaaaaaaaaaaaaaaaaaaaaaaaaaaaaaaaaaaaaaaaaaaaaaaaaaaaaaaaaaa

SEQ ID NO: 6901 - DNA, 1894 bp, Homo Sapiens
  NM_198540
tcttcctccagctgttcccacaggctccattattcaaactttgggggaggaaatcagggctggacagatcatcaactgctgctgctgacagactgtgttcctgccatgatggggacaggcctgccccaaaccaggctgtctcaccagaaaccagccctaacacgccagagccccatctctcaggtcggcctcctgccctcctccctccctccctccctccctctctcctgcctcagccccgccccggcccctggggccctccctgctcccgctccactcccctccccgcccctctggactggctgggcagggctgggccccgccggtcgacaacacaggggctggggcaggcagatcagagggagctgagggaggcctgacctgaggccggcacccggagctggcgggagccagacccagagctcccgcggccgccccttccctgggccgggtcatgcgctgccccaagtgccttctctgcctgtcagcactgctcacactcctgggcctcaaagtgtacatcgagtggacatccgagtcccggctcagcaaggcctaccccagccctcggggcaccccgccaagccccacgccagccaaccctgagcccaccctacctgccaacctctccacccgcctgggccagactatcccgctgccctttgcttactggaaccagcagcagtggcggctggggtccctgcccagtggggacagcactgaaacggggggctgccaggcttggggggccgccgccgccaccgagatccctgacttcgcctcctaccccaaggacctccgccgcttcttgctgtcagcagcctgccggagcttcccacagtggctgcctggaggtggtggcagccaagtctccagctgctcagatactgatgtcccctacctgctgttggccgtcaagtcagaaccagggcgctttgcagaacgacaggccgtgagagagacgtggggcagtccagctccagggatccggctgctcttcctgctagggtctccggtgggtgaggcggggcctgacctagactcactagtggcctgggagagccgtcgctacagtgacctgctgctctgggacttcctcgacgtcccattcaaccagacgctcaaagacctgctgctgctggcctggctgggccgccactgccccaccgtgagttttgtcttgcgagctcaggacgatgcctttgtacacacccctgccctgctggctcacctgcgggccctgccacctgcctcggcccgaagcctctacctgggtgaggtctttacccaggccatgcctctccggaagccaggaggacccttctatgtgcccgagtccttcttcgaaggtggctacccagcctatgcaagcgggggtggctacgtcattgccgggcgcctggcaccctggctgctgcgggcggcagcccgtgtggcacccttcccctttgaggacgtctacactggcctttgcatccgagccctgggcctggtgccccaggcccacccaggcttcctcacagcctggccagcagaccgcactgcggaccactgtgctttccgcaacctgctgctggtacggcccctgggcccccaggccagcattcggctctggaaacaactgcaagacccaaggctccagtgctgactctcattggggagggcggaggtgctgacctggcctgggcctctggggccggcccctggctcagcccctccttccaggtcttgatgggagggaggagggcccagaagctggacaacttaagccactccttggcctcccccagccaggggcctgggcaggaaagatggggtggtggactgtttttgcctactttttgtttttgaaaaacatgcactccccactctgaaaaaaaaaaaaaaaaaaaaa

SEQ ID NO: 6902 - DNA, 2206 bp, Homo Sapiens
  NM_198542
cgctgcggcgaccagctccggaaagcgcggtggggacgcgctgtgttctcgcagctcagaggcgggtctgaggctcggtggcggcgcccagggtggcccgggccctttcctcggtcgttgtctcaccgccacaggctccgatggcggcggccacgctgagggaccccgctcagcagggctatgtgacctttgaggacgtggctgtctacttctcccaggaggaatggagattgcttgatgacgctcagaggctcctctaccgcaatgtgatgctggagaactttacacttctggcctctctgggacttgcatcttccaagacccatgaaataacccagctggagtcatgggaggagcccttcatgcctgcttgggaagttgtgacttcagccatactgagaggtagttggcaaggagccaaggctgaggcagctgctgagcagagtgcttctgtagaagtgccaagttcaaacgttcagcaacaccagaagcagcactgtggagagaaacccttaaaaagacaagagggcagggtcccagttttgaggagttgcagagtccacctatcagagaagtccttgcaaagcagggaagttgggaaggatcttctgaccagctcaggtgttctcaagcaccaggtgactcacacgggagagaagtcacataggagctccaaaagtagggaggcctttcatgctggaaaaaggcattacaaatgcagtgaatgtgggaaagcctttggtcagaaatatttacttgttcagcaccagagactgcacactggggaaaagccttatgaatgcagtgaatgtgggaagttatttagccataagtccaacctttttatacaccaaatagttcacactggagaaaggccttatgggtgtagtgactgtggaaaatcctttagccgtaatgctgacctcattcaacaccagagagttcacactggagaaaagccttttacatgcagtgaatgtggaaaagctttcaggcataattccacacttgttcagcatcacagaatccacactggagtaaggccttatgagtgcagtgaatgtggaaaattgtttagtttcaactccagcctcatgaaacatcagagagttcacactggagaaagaccttataagtgcagtgaatgtggaaaattctatagccacaagtccagccttatcaatcattggcgtgttcacactggagaaaggccttatgagtgcagtgaatgtgggaaattttttagccaaagctcaagcctcatgcaacatcgaaaagttcacactggagaaaaaccttttaagtgcaatgaatgtgggagattctttagtgagaattccagccttgttaaacatcagagggttcacactggagcaaagccttatgagtgcagggaatgtgggaaattttttcgccacagctccagtcttgttaaacatcgaaggattcacactggagaaatacaatgattgtgagaaatcctttagctggtgtttcaacctcattcaacaccagaaagttcacagtgtaaaaaagtcttgaaggttactaatggaaatccattagctatacctccaaactcattcaacactggacagttcacagagtggacaatgtagtgaatatggtaaaaggcctcagccaaaggcctaaccgtattcaacaccagaaagtttagactggagaaaggccttagactgtcgctgaatcaatatgacctgacttaaagcagaaacagccaggcgtggtggctgacacctgttattctcaccactttgggaggctgaagcgggcggatcacaaggtcaggacatcgaaaccatcctggttaacacaatgaaaccacatctctactaaaaatacaaaaatttactgggcatggtggtgggcgcctgtagtcccagctactcaggaggctgaggcagaagaatggcatgaacctaggaggcagagtttgcggtgagctgagatcacgccactgcactccagactgggtgacagagtgagactctgtctaaaaaaaaaaaaaaaaaaaattagcccggcgtggtggcaggcaactgtagtcccagctacttggggggctgaggcaggagatttgcttgaacccgggaggcggaggttgcattgagccgagatcacgccactgcactccagcttgggtgacagagtgagacttcgtctcaaaaaaaaaaaaaaaaaaaaa

SEQ ID NO: 6903 - DNA, 1516 bp, Homo Sapiens
  NM_198552
gctgcagcggggcaggcgcgtggccgggccgcggcgcgatgagtggggcccgggcggcgcccggggccgcgggcaacggcgcggtccgggggctgcgggtggacgggctgcccccgctgccaaagagcttgagcgggctgctgcactcggcgtcgggcggcggcgcgtctgggggctggcggcacctggagcggctgtacgcgcagaagtcgcgcatccaggacgagctgagccgcgggggcccgggcggcggcggggcccgggcggcagcgctgcccgccaagcctcccaacctggacgccgctctggcgctgctccgcaaagagatggttggtctccgccagctggacatgtccttgctctgccaactgtacagcctctacgagtcgattcaggagtacaagggggcatgccaggcagcctccagcccagactgcacttacgctctggagaacggcttcttcgatgaagaggaggaatatttccaggagcagaactccctgcacgacaggagggaccgaggccctcctcgggacttgtcactgcctgtctcctccctctccagcagcgactggattctggagtccatctagagggtcttgggagggatgtgactgttgggaagcccttcctactggacacgctgtcatcatttgctgcttctcttgcaagaaagcacctccgttgtggacggtcctcgggcacaggggatgagcgctaccagtttcatttgtaggcagggagttctccgcggatgcatggtggcagtctgctttgatggcagcagtttctgcttaggtgacctagaggtcctcagcagtatcctccacacctatttattgaggtgcacctgctggggattcataatgagaatataacaagaggatctcggtgaaaggccttagtgggtgttttgtgtgaggtggcttgtagctagctacttccttacagatggtagagtattccaatcctctttgtgttagggttcttgcttccagtttgggatgtattaaaaccaccatttcactgcttcccttcctcaatatgctctgcagcttttcttgctgtttaaacctctcgcctcagctttatttatttgtaagctgcattactaactgcccagtgattcggtgaaagctttttactgaaaaagttaacatttctagtcatcccaatcaactggcttttttcaaccaaaattttatatcattctttgtctatcagatacgagaggaaggaagataatacgaagacatgttgaatagtgaaaaaaaaaaaaagaacacaaaaactggggcaagccaatgtgatgtatcactcactgtaagatggcaaatgttttcatttttaagattccgaatgtaaactagtgtgctagaaagcaaaccacccgccactcaaaccagtaattaccttaagccttaatatatttattaaaatactttatgagaacattacactttgtaggttaaaaatgaggataaaatgctaaactatcaaaaaaaaaaaaaaaaaa

SEQ ID NO: 6904 - DNA, 759 bp, Homo Sapiens
  NM_198555
gcgctgagagtctgtgcggaggtccgtggacagactgctttgctcgttgttgctcttcggaggcggcgatccccgaaggcgagctgaaatacggctgcaggctacaatttgcagccgacgattatggaagacggcaagcgggagaggtggcccaccctcatggagcgcttgtgctcggatggcttcgcatttccccaataccccattaaaccgtatcatctgaagaggatccacagagctgtcttacatggtaatctagagaaactgaagtaccttctgctcacgtattatgacgccaataagagagacaggaaggaaaggaccgccctacatttggcctgtgccactggccaaccggaaatggtacatctcctggtgtccagaagatgtgagcttaacctctgcgaccgtgaagacaggacacctctgatcaaggctgtacaactgaggcaggaggcttgtgcaactcttctgctgcaaaatggcgccaatccaaatattacggatttctttggaaggactgctctgcactacgctgtgtataatgaagatacatccatgatagaaaaacttctttcacatggtacaaatattgaagaatgcagcaaggtataggtcaaccaatgttattttcaaactatctgaaatgaatttattttaacattgacacatgtaagggtcaatttttcatatttggaagctcaaacattccttgaatgaaaatattttgaaatgccaaaaaaaaaaaaaaaaaaaaaa

SEQ ID NO: 6905 - DNA, 4746 bp, Homo Sapiens
  NM_198563
gcggagtcggcggccgggcggaggtaccggctcaggcttgggatcccggctgcgggtttggcggcgctgcgccggcaggcagcgaggccgggcgggccctgggccctcgcgcccctcccgcgaggcctgtcatgcagggccccgccgggaacgcgagccggggactgccaggcgggccgccctccacagtcgcgtccggggcgggccgctgcgagagcggcgcgctcatgcacagcttcggcatcttcctgcaggggctgctcggcgtcgtggccttcagcacgttaatgctcaaacgcttcagagaaccaaagcatgaaagacgtccgtggaggatatggtttttagacacttccaaacaagccataggaatgctgttcatccactttgcaaatgtatacctagcagatctcactgaagaggacccttgttcactgtacctcatcaacttcctcctggacgccactgtgggcatgctgctcatctacgtgggggtgcgcgccgtcagcgtcctggtagagtggcagcagtgggagtccctgcgcttcggcgaatatggagaccctctgcagtgtggagcctgggtcgggcagtgcgctctttacatcgtgatcatgatttttgaaaagtctgtcgtcttcatcgtcctcctaatacttcagtggaaaaaggtggccctgttgaatcccattgaaaacccagacttgaagctggccatcgtcatgctgatcgtccccttctttgtcaacgctttgatgttttgggtagtggacaatttcctcatgagaaaggggaagacgaaagctaagctagaagaaaggggagccaaccaggactcgaggaatgggagcaaggtccgctaccggagggccgcatcccacgaggagtctgagtctgagatcctgatctcagcggatgatgagatggaggagtccgacgtggaggaggacctccgcagactgacccccctcaagcctgtgaagaaaaagaagcaccgctttgggctacccgtatgacacattcccatgctgggggtgacgggagggccccgccagccgctggtgtgcagaggtcatcccgcagcatcgttccttaccctctctctgcccttcctttctacctctgctcctcttgctgtctctgcccgctctcgcctgcccccagactactgtgacttaaaaagagggaagaggagccagcgcccgagggggccactggcggctggaggtccccattcagttgcactacaaacactgaccaaatatgcaaggaaggagctgtgtttgtttgttgtcgtcccagacagtgttgtgagggacctgaggccctgccccgtgtccgaccaccgagtggcaaggtggaaggaagcacaggcacacagaccgtgggtgggtctcctcaccgtggctgtgggcagtgcgaacacataacaccctcgggctaaaagtgactcgttgaccaagttggaaccggaatgctttcttactcaaaatggcttttgtaactattgatttctgaagctggttttatgagttgtgacagtgttaccaggttgggggtatgtgtttatttcctacaaagtacttacgggactaatgggcaaaacagagatttttaagtcttccgtatgctgtttgacttttatatttttaagttatattttcatactattgtatttaaaaactctttttagtccccaaagaaatgggtttatttgcctttcatggggtgtgggctggcaggaggaaaaatcgggagttttttatttggaatattattagatgatgccctatgataagatgagacaaatgatggggagggaaggaggatggcccttctctagaatcagcaaacccaatggttctgtgaaggtcagacccaagcttggagcagctggtctggatgcagatccaggagctgcagagtgtggaacaggaaaggctctgcccagggcccacgagctctagcattcctgctggcagattagagatcttagttaaatttgaccaagaaaggagcttagctaagaggtctttgtttccagaggacccaagactaccagactcctgtgcagtctgcctgtctgcagagcctccaatcacggtttaaagtggtcttggcctcccagcccccactgctgcagccttcagagccagcctctggactcagcgccaggagcctcctctcctgctgccctggtacctgtcatcctagtgtcacctatttgttttgcacagcattctggagaacatgtgcctcacaaagtgatcctgtttttctcaccctccaaagctgaggtggctaagggaggcaggggtgagagagctcactctctaaaccacaggcagggcaaggtgcttctaggccgtgtcccctccctggggaatggtcactactcctcagcatggccacaggcccctgtggttttgggagtttgctgagtgactggaatgggctgaccccagccgtttccctgctgtggaagcagcaaggtaggggcactgctcggtggtttgtcaagctcagaggcagccacggatggttaggaacaggaagccacactgctaaggtgtgatgagctagaagggagacatcctggacttcaagtgagacaagtgcagaggaggccactccacttaggaccttcctcttagacctgcatgagcacgtgtttcacttaagcacattgggtccgaattgtggcgcatgaacccagctgttaaaccaggtaccctgggactgccctctgcctctcagagccctacctgtcctggacttgaaggcgagcatcaggcaggccttctcagcccatcttccaccaggagtgcagagccagggtgctgagaggagcagggactgtaactacagtaggaggcaactttgctggtgtcattcctgctcggattgactttgtgctccctcccatccacagctatggtagccagtatttccccagcagctctctagtggggaagagtggctagaaccaggccattctcagtcgaatttaggaagaccaagactcatgttcctgacaggacggtcattccctcatggcatcactgactcagttctaattcctcccctcctgtttcattttggtttgaacaacctgtgcctgcagctgtttcttccaccttcctggagctcacaattggagcttcatgttcagtcttgagctcctaatgtttccagacagggcaggggataggacagccataatctatgaaagctgtgaaacaaaccctgggttatatagacctcagatggtctcatctgaaggctttgcccacttcccagtgagcagagggtttggggaacaaagaggtagctgaagagtggtggtttttccctgtatcctgattttcagaaagggctttagtctctgagctgtggctagtagctggctggctgaccaggggacgggggtctaatagggtgtctgaccataggacacctctcgtgtttggccttccctttcttgtgtgtttgtgtgtgtgtgtgcatgtacacacacaaatctgtatccccaggagtgcctcctgcagtcactgggggctcttccgtggtgcaccatcccatgagagcagatcagagggctgtggtcaggacttcctcccgagctgccctccctccctgggatgagtttcctctccacctgctccaaggtgccttacgaggtgcagctcttcacctggccacatggcatccatcaccgtgttgagaaatggtgggacgttggctggatattgtgtgctatgaatctgatttgtccaaatctggacctcagccaagccacctgtggtggaaccttgcaagtcaaggtcatgaacaaatttcttgtaactattggaaataaactaatgaggtagaactgtcatatccaaatggaagaggtggttggtactgttacttccttttgctgtcagagggttgttgacaatggcaaggggggatgttagtgagatccaggtggtggtggcttcttggtccactcagcttgcacacatgcaagaggagggtctgtggcccctcagccgtgctggtggcctccttcctcaagctttaacttgtgccctccctggcaacagggagtcatgggttaatgtcacctgtcatgcctctttcttcagggaaaatattaaaaggctcaaatccaagctgtgacttcccttagacagtgtaagcctgtagggtgcagccccaagtttatgtccaaaggctgcctcagaaccctggagggagcagcgcccagctggcagctcactctgcccttgcagttcactggccttttcgcagccaggctaagataggcagtgcaaggagcttcccactggccagagcagctgccttgtagaatgtggggctggcttttagaagtttcacacgcttgcagctaagagtgcagagctctctgttttacttcgtgaaacattagcagctctgaggggcttggcttttggtaagggacttatggtctgacttgccacaagcaccttgagctcctgggttggttggtggttggttggttgggttgttttaaatttgatttttcttttcctgaagtttgttagaagtcagacctatgcaaggaaaaccatggcccacttcagcagccatccagtgggggtgcttaatcggtggtggtaggattcatggaaacgtttttttgaaatgaaagagaagatgatgtacttacattgtaaaatggtttacaataaagtttggcatcttaaaaaaaaaaaa

SEQ ID NO: 6906 - DNA, 2488 bp, Homo Sapiens
  NM_198565
ggtagcccagccccgcgttcggctgctctcgaggaggccggagcccccggagacgatgcgccccgcgcagccgcctgcgcctgcgggagccggctgcccttgagatggagttgctgcctctttggctctgcctgggttttcacttcctgaccgtgggctggaggaacagaagcggaacagccacagcagcctcccaaggagtctgcaagttggtgggtggagccgctgactgccgagggcagagcctcgcttcggtgcccagcagcctcccgccccacgcccggatgctcaccctggatgccaaccctctcaagaccctgtggaatcactccctccagccttaccctctcctggagagcctcagcctgcacagctgccacctggagcgcatcagccgcggcgccttccaggagcaaggtcacctgcgcagcctggtactgggggacaactgcctctcagagaactacgaagagacggcagccgccctccacgccctgccgggcctgcggaggctggacttgtcaggaaacgccctgacggaggacatggcagcgctcatgctccagaacctctcctcgctgcggtccgtgtccctggcggggaacaccatcatgcggctggacgactccgtcttcgagggcctggagcgtctccgggagctggatctgcagaggaactacatcttcgagatcgagggcggcgctttcgacggcctggctgagctgaggcacctcaacctggccttcaacaacctcccctgcatcgtggacttcgggctcacgcggctgcgggtcctcaacgtcagctacaacgtcctggagtggttcctcgcgaccgggggagaggctgccttcgagctggagacgctggacctgtctcacaaccagctgctgttcttcccgctgctgccccagtacagcaagttgcggaccctcctgctgcgcgacaacaacatgggcttctaccgggacctgtacaacacctcgtcgccgagggagatggtggcccagttcctcctcgtggacggcaacgtgaccaacatcaccaccgtcagcctctgggaagaattctcctccagcgacctcgcagatctccgcttcctggacatgagccagaaccagttccagtacctgccagacggcttcctgaggaaaatgccttccctctcccacctgaacctccaccagaattgcctgatgacgcttcacattcgggagcacgagccccccggagcgctcaccgagctggacctgagccacaaccagctgtcggagctgcacctggctccggggctggccagctgcctgggcagcctgcgcttgttcaacctgagctccaaccagctcctgggcgtcccccctggcctcttcgccaatgctaggaacatcactacacttgacatgagccacaatcagatctcactttgtcccctgccagctgcctcggaccgggtgggcccccctagctgtgtggatttcaggaatatggcatctttaaggagcctgtctctggagggctgtggcctgggggcattgccagactgcccattccaagggacctccctgacctacttagacctctcaagcaactggggggttctgaatgggagcctcgccccactccaggatgttgcccccatgttacaggtcctgtctctcaggaacatgggcctccactccagctttatggcgttggacttctctgggtttgggaatctcagggacttagatctgtcggggaattgcttgaccaccttcccaaggtttgggggcagcctggccctggagaccctggatctccgtagaaactcgctcacagcccttccccagaaggctgtgtctgagcagctctcgagaggtctgcggaccatctacctcagtcagaatccatatgactgctgtggggtggatggctggggggccctgcagcatgggcagacggtggccgactgggccatggtcacctgcaacctctcctccaagatcatccgcgtgacggagctgcccggaggtgtgcctcgggactgcaagtgggagcggctggacctgggcctgctctacctcgtgctcatcctccccagctgcctcaccctgctggtggcctgcactgtcatcgtcctcacttttaagaagcctctgcttcaggtcatcaagagccgctgccactggtcctccgtttactgacctggctgtgtgccaagactcgaaattcggtccgcacacaacaggacactttctctgccagctttcaagatgtgatgcagaggccaagtctgacgaattgaagtttcaattaaaatttaatatgtttccattcctcatcgcccaccccacccccgcccccaccaccgcccaagttctttttccatcattataattcatccttattatcttggtaaaatatttattaagtgactttttcagaaataaaaggcaacgtgtctcataaatattttttaaattaaaaaaaaaaaaaaaaaaaaaaaaaa

SEQ ID NO: 6907 - DNA, 2087 bp, Homo Sapiens
  NM_198567
gctcggggcggggccggcgtggcggtggcccgggttgtagccgccgccgctgccgccgccccgccgccgccacctcagaagcaggaaccgaagtcgtcgccgccgccgccactgcctgggtcttcggtcggggcccgcagccatggaggatttcatcgtgatctcggacgacagcggctctgagagctccgggggcgcccgcccgggccggtcgcggaggccgcgccgggccctgtcgcgaacctccggcgcgctgccccgccggaccgtgaacaagggtcaaaaattagaacccatccctcatcgaagactaagaatggtaacaaataccattgaagagaattttcctctggggactgtgcagtttttgatggactttgtgtcaccccagcattacccaccaagagaaatcgtggctcacatcatccagaaaatcttgctcagtggctctgagactgtggatgtcctaaaggaggcctacatgcttctcatgaaaattcaacagctacatccagccaatgccaagacagtggagtgggactggaaactgctcacctatgtcatggaggaagagggacaaactctgcctgggcgagtccttttcctgcgttatgtcgttcagaccctagaagatgactttcagcagaccctgaggaggcaacggcagcacctgcagcaatccattgcaaacatggtgctttcctgtgacaagcagccccacaatgtcagggatgttatcaagtggctggtcaaagcagtaactgaagatggattgactcagcccccaaatggaaatcaaacgtcttcaggaacaggaatcttgaaagccagcagtagccacccttcttcccagcccaacctgacaaagaacaccaatcagctgattgtgtgccagcttcagaggatgctctccatagccgtagaggtggacaggacccccacctgcagctccaataaaattgccgagatgatgtttgggtttgtgctggacattcctgagaggagccagagagaaatgttctttactaccatggaaagccaccttctgcgctgcaaagtgttagaaatcatattcctccacagctgtgagacacccacccgcctgcctctgtctctggcccaggccctctactttctgaataattctacgtcactgctcaagtgtcagtcagataaaagccagtggcagacttgggacgaattggttgagcatctgcagtttctgctgtccagttatcaacatgttttaagagaacacttaaggagttccgtgatcgaccgaaaggacttaataatcaaaaggattaagcccaaaccccagcaaggagatgacatcacagtggtagacgtagagaagcagattgaggccttccgcagccgcctgatccagatgctgggggagcctcttgtcccccaactccaagacaaagtgcacttgttgaagctcctgctcttctatgctgcggacttgaaccctgatgcagagccctttcaaaagggctggagcggctcctgagggcctgccaagcactgaatgccaagaatacctcctgaactctctctccaactgctcagaagctctaaaagcatgaaaagtggttaaaatcttacaggaccaaacctgcattatttaatcagtaggttgtaatttctaactctagtaaatatctttttttaaataatcctatcctagcctgttctcaaatatggcttaaatatacaaggtatatatattttttaataaattatttatctatacttttttgaaacaggttaatactctgtgcatcacatgtttaacattttcattcaagatgtggaaaaaatccctctgctgaacctagtctatacaccaatattatgtcattcaaggtaccgacaacctgtttcaggagagagacgttcatttttccctaatgaaatgcaagcattctgttagacctattatattgcctgttaatttgactgtaatgaatagggggtagaaacaaaaggatcaagtgtgttataaaacatttgatgttaaaaggagacaataaaaaggcaatggtttttcaaaaaaaaaaaaaaaaaaaaaaaaaaaaaaa

SEQ ID NO: 6908 - DNA, 3562 bp, Homo Sapiens
  NM_198580
ggggcggggctggagcggcccgcggcctcagctctctctgcttccccaggatgcgggctccgggtgcgggcgcggcctcggtggtctcgctggcgctgttgtggctgctggggctgccgtggacctggagcgcggcagcggcgctcggcgtgtacgtgggcagcggcggctggcgcttcctgcgcatcgtctgcaagaccgcgaggcgagacctcttcggtctctctgtgctgatccgcgtgcgcctggagctgcggcggcaccagcgtgccggccacaccatcccgcgcatctttcaggcggtagtgcagcgacagcccgagcgcctggcgctggtggatgccgggaccggcgagtgctggacctttgcgcagctggacgcctactccaatgcggtagccaacctcttccgccagctgggcttcgcgccgggcgacgtggtggccatcttcctggagggccggccggagttcgtggggctgtggctgggcctggccaaggcgggcatggaggccgcgctgctcaacgtgaacctgcggcgcgagcccctggccttctgcctgggcacctcgggcgctaaggccctgatctttggaggagaaatggtggcggcggtggccgaagtgagcgggcatctggggaaaagtttgatcaagttctgctctggagacttggggcccgagggcatcttgccggacacccacctcctggacccgctgctgaaggaggcctctactgcccccttggcacagatccccagcaagggcatggacgatcgtcttttctacatctacacgtcggggaccaccgggctgcccaaggctgccattgtcgtgcacagcaggtactaccgcatggcagccttcggccaccacgcctaccgcatgcaggcggctgacgtgctctatgactgcctgcccctgtaccactcggcaggaaacatcatcggcgtggggcagtgtctcatctatgggctgacagtcgtcctccgcaagaaattctcggccagccgcttctgggacgactgcatcaagtacaactgcacggtggttcagtacatcggggagatctgccgctacctgctgaagcagccggtgcgcgaggcggagaggcgacaccgcgtgcgcctggcggtggggaacgggctgcgtcctgccatctgggaggagttcacggagcgcttcggcgtacgccaaatcggggagttctacggcgccaccgagtgcaactgcagcattgccaacatggacggcaaggtcggctcctgtggtttcaacagccgcatcctgccccacgtgtaccccatccggctggtgaaggtcaatgaggacacaatggagctgctgcgggatgcccagggcctctgcatcccctgccaggccggggagcctggcctccttgtgggtcagatcaaccaacaggacccgctgcgccgcttcgatggctatgtcagcgagagcgccaccagcaagaagatcgcccacagcgtcttcagcaagggcgacagcgcctacctctcaggtgacgtgctagtgatggatgagctgggctacatgtacttccgggaccgtagcggggacaccttccgctggcgaggggagaacgtctccaccaccgaggtggagggcgtgctgagccgcctgctgggccagacagacgtggccgtctatggggtggctgttccaggagtggagggtaaggcagggatggcggccgtcgcagacccccacagcctgctggaccccaacgcgatataccaggagctgcagaaggtgctggcaccctatgcccggcccatcttcctgcgcctcctgccccaggtggacaccacaggcaccttcaagatccagaagacgaggctgcagcgagagggctttgacccacgccagacctcagaccggctcttcttcctggacctgaagcagggccactacctgcccttaaatgaggcagtctacactcgcatctgctcgggcgccttcgccctctgaagctgttcctctactggccacaaactctgggcctggtgggagaggccagcttgagccagacagcgctgcccaggggtggccgcctagtacacacccacctggccgagctgtacctggcacggcccatcctggactgagaaactggaacctcagaggaacccgtgcctctctgctgccttggtgcccctgtgtctgcctcctctccctgcttttcagcctctgtctccttccatccctgtccctgtctggccttaactcttccctctttttcttttctttctttctttcttttttttttaagatagagtctcactctgctgcccgggctagagtgcagtggtgggatctcggctcactgcaacctctgcctcctggggttcaagtgatcctcccacctcagcctcctgagtagctgggattacaggcacccgccaccacgtccagctaatttttatatttttagtagagacggggtttcaccatgttggtcaggctggtcttgaactcctgacctcaggtgatccgctggcctcggcctcccagagtgctgggattataggcgtgagcctctggcccggcctttcctttttcctctcctctcctgccgagagtggaacacacgtgtcctgggagctgcatcttgtgtagggtccagctgcttttggggactgcaggaatcatctcccctgggccctggactcggactggggcctccccacctccctctcggctgtgccttacggagccccaatccaggcctcctgtggctgttgggttccagatgctgcagctccatgtgacttccaagcaggccctccgccctccctgctgaatggaggagccgggggtcccccaggccaactggaaaatctcccaggctaggccaattgccttttgcacttccccgttcctgtcacatttccccagccccaccttcccctcctgatgccctgaaagcttccggaattgactgtgaccacttggatgtcaccactgtcagcccctgccttgatgtccccatttagccatctccatggagctcctgctggagggccctgaaccctgcactgcgtggctgcccagccagctgcctcctgtcctgggaggaggcctcctgggtgtcctcatctggtgtgtctactggagggtcccacaggagaggcagcagaggggtcaggggaggtctcctgccgggggttggcctctcaagcctcaggggttctagcctgttgaatataccccacctggtggtggcccctccgatgtccccactgatggctctgacaccgtgttggtggcgatgtcccagacaatcccaccaggacggcccagacatccctactggcttcgctggtggctcatctcgaacatccacgccagcctttctggggccggccacccaggccgcctgtccgtctgtcctccctccagcagcaccccctggcccctggagtggtggggccatggcaagagacaccgtggcgtctcatgtgaactttcctgggcactgtggttttatttcctaattgatttaagaaataaacctgaagaccgtcaaaaaaaaaaaaaaa

SEQ ID NO: 6909 - DNA, 4476 bp, Homo Sapiens
  NM_198597
gaaccggaagtggagcctgggagccttgacgttaggaacgaagtctaacctggatctggagccgggtgagatcaaattgggaatgctttcataatgaacgtcaaccagtcagttccacctgtgccaccatttgggcagccccagcccatctacccagggtatcatcagtccagctatggtgggcaatcagggtccacagcccccgccattccctatggagcctacaatggcccagtaccaggctatcagcaaacacctccccaaggtatgtcaagagccccaccttcctcgggggcacctccagcctcaacagcacaggctccttgtggccaggctgcatatggccagtttggccaaggagatgtacagaatgggccaagctccactgttcagatgcaaaggctgcctgggtctcagccatttgggtccccattggcccctgtgggcaaccagccacctgtgcttcagccctatggccctcccccgacaagtgcacaggtggctacgcagctgtctggaatgcagatcagcggtgctgtggccccagcccctccttcttcagggctgggctttggcccaccaacatcgctggcttcagcctcaggaagtttccctaactctggtctgtatggctcctatcctcagggccaggctcctccccttagccaggcccaaggtcatcctgggatccagactccccagcgatctgccccatcacaggcctccagcttcacacccccagcttcagggggtcctcggctgccttcgatgactggtccactcctgcctggacagagttttggagggccctcagtgagccagcccaaccatgtgtcttcacctcctcaagctctgccccctggcacccagatgactgggcccctgggaccactgccacctatgcactccccgcagcagccaggctatcagccccaacaaaatggttccttcggaccagcccggggccctcagtctaattatggaggcccctacccagcagcacccacctttggcagtcagcctgggcctcctcagccactgcctcctaagcgcctggaccctgatgccatcccaagccctattcaggtcattgaagatgacaggaacaaccggggtacagagccatttgttactggagtacggggccaggtgccacccttagtcactaccaacttcctggtgaaagaccaagggaatgcaagtccccgatacatccgatgtacatcctataatatcccttgcacatctgacatggctaagcaggctcaggtgcccctggcagcagtcatcaaaccgctggcaaggctgcccccagaggaggcttcaccgtatgttgtggaccatggggaatctggccctttgcgctgcaaccgctgcaaagcatacatgtgtcccttcatgcagttcattgaaggagggaggcgtttccagtgctgtttttgcagctgtatcaatgatgttcccccccagtattttcagcacctggatcataccggcaaacgtgtggatgcttatgaccgccctgagctatccctgggctcttatgaattcttggccactgtagattactgcaagaacaataagttccccagccctcctgcctttatcttcatgattgacgtctcctacaatgccatcaggactggtcttgttaggctcctctgtgaggagctcaagtcactgttagactttctacctagggagggtggggcagaagagtcagcaatccgcgttggctttgtcacctacaataaggtgctccacttctataatgtgaagagctcattggcccagccacagatgatggttgtgtctgatgtggctgacatgtttgtgccactgctggatggcttcctggtcaacgtcaatgagtctcgggcagttatcaccagcttattggatcagattccagaaatgtttgcagacacaagggaaacagagacagtatttgtaccagttatccaggctggaatggaggctctgaaggctgctgagtgtgcagggaagctctttctattccatacatccctgcccattgcagaggccccagggaaactgaagaacagagatgacaggaagctgatcaatacagacaaggagaagactctgttccagcctcagacaggtgcctatcagaccctggccaaagagtgtgtggcccaaggctgctgtgtagatctctttctcttccctaaccagtatgtggatgtggccacactctctgttgtgccccagctcactggtggctctgtctacaaatatgcttcctttcaggtggagaacgaccaggagcggttcctgagtgacctgcgtcgtgatgtccagaaggttgttggctttgatgctgtgatgcgggtccggacaagcactggtatccgtgctgtagatttctttggagctttctacatgagcaacacgacagatgtggagctggctgggctagatggggacaaaacagtgactgtggagttcaagcatgacgatcggctcaatgaagagagcggagctctcctgcagtgtgccctgctttacaccagctgtgcagggcagcgtcggctccgcatccataatctggccctgaactgctgcacccagctggctgatctatatcgaaactgtgagactgacacgctcatcaactacatggccaagtttgcatatcggggagtcctgaatagccctgtgaaggctgttcgtgacacgctcatcacccagtgtgcccagatcctggcctgttacagaaagaactgtgctagcccctcctctgcaggacagttgatccttcctgagtgcatgaagctactcccagtttacctgaactgtgtgttgaagagtgatgtcctgcagcctggagctgaagtcactactgatgaccgtgcctatgtccgacagctagttacctccatggatgtgactgagaccaatgtcttcttctaccctcggctcttacctttgacaaagtctcccgttgagagtactaccgaaccaccagcagttcgagcctctgaagagcgtctaagcaatggggatatatatttactggagaatgggctcaacctcttcctctgggtgggagcaagcgtccaacagggtgttgtccagagccttttcagcgtctcctccttcagtcagatcaccagtggtttgagtgttctgccagttctggataatccactgtccaagaaggttcgaggcctcattgatagcttacgggcacagagatcccggtacatgaagcttaccgtggtgaaacaggaagacaagatggagatgctgttcaagcacttcctggtggaagacaagagtctgagtgggggagcatcttatgtggactttctctgtcatatgcacaaggagattcggcagctactgagctaaagcaagtgggtaaatggcatagggcccaggctagcttccagaaagcaccccaggatgtcagagaaattgggacagtaacatatcttatgtaagctgacctcagtctctctggggggagggggagatataaggagacaccttctttctgggctcaagtatcctgccactctgtcatgtcctgctgatggaaggtgcccctgttccctcattctaccctctttttcctgctaatcctgtcataatgaatgtagcttctcagttcactgtatatgattcggtattgggggtttggaggcacccagaccctggcaatattatgtgtccctttggaccagtctcccaagaggagaggggcaggcaggaaagagtggggatcctaaggttactacagggggctcagtgtcatccacaacttcctatattagggataaaacatataggtgcacaagagctggggtatagcccataggtggtggagagaaaagtggtcagtccttcttgggcctggaggttagcagtcaagtttctctgctttcactgctcgctcgctctctcctgcaatgattgatgatcactccgtggatagagaggcacactgtcagaggtgaccggagaactgagttgcaaaatatattaagatctggtagaggtaccagcttcctttccagctggagaggccccaacactggatggttctgtagggagcctagggagcctggtcatcaacttgcaatacctcacagagccagttcacatcccactctgagctcccacgagaaacactgcttctccaggcccggggttgttggggagagaggcagaggcagctggagcgccgttctctcctgctgggacaccgcttgggctttggtattgactgagtggctgacagttatcttccaaccccaactggcttgggggcaggacaagggctaggcttgatggtggccaggcttgcctgctccccacctgggatgcccctgctctggacctctcatttctcttcattggtttatttttcaatgcatctttaatttgtaaagaaataaaataaattaagatgtaaccattagcctcatcaaaaaaaaaaaaaaaaaa

SEQ ID NO: 6910 - DNA, 6204 bp, Homo Sapiens
  NM_198679
gagattcctcaggcttcccttgtgaggctgcctgggttctgccgctgggtggtttgggatgtccaagagatatcccctttcagccagtgactcggtcctcagttgctgctccggaaagacgctggggctgggaagggccctgtgtcctctggctttaaaatgggcaatgctattgaaaaacagaagcccttgaaacgaagtcatctgtacccctggaaacaagactctcagcgttctcatctctcttccttcaccatgaagctgatggacaaattccactcacccaaaatcaagagaacgccatcaaagaagggaaaaccagctgaggtgtccgtaaagattccagagaagcctgtgaacaaagaggcaacagacagatttctaccagagggctaccctctccccttggatctggagcagcaggcagtagaatttatgtccaccagtgctgtggcttccaggtctcaaaggcagaagaacctgagctggctggaggagaaagagaaggaagttgtcagtgccctgcgctactttaagaccattgtggacaaaatggcaattgataagaaggtactggagatgcttccagggtcagccagcaaggtgctggaggccatcttacccctggtgcagaacgatcctcgaattcagcacagctcagccctctcttcctgctatagccgagtgtaccaaagcctcgccaacctcattcgctggtctgaccaagtgatgctggaaggcgtgaactcagaagacaaggagatggtgacgactgtgaagggggtcatcaaggctgtgctggatggagtgaaggagctggtcaggctcaccatcgagaagcagggacgtccgtctccgacgagccccgtgaagcccagttcccctgccagcaagcctgatggcccagcagagctccccctgacagaccgcgaggtagagatcctaaacaagacgactgggatgtcacagtcaactgagctcctcccagatgccacggatgaagaggtcgcgccccccaagcctcctctgcctggcattcgggtggttgataatagtcctccaccagcattgccacccaagaaaagacagtcggcgccgtcccctacccgagtggctgtggtggcccccatgagccgagccaccagtggctccagtttgcctgttggaatcaataggcaggattttgatgttgactgttacgcacagaggcgactgtcaggaggcagccactcatatggtggagagtcgccccgcctctccccctgcagcagcataggcaagctcagcaagtcagacgagcagctgtcctctctggacagggacagtgggcagtgctcccggaacacaagctgtgaaacactagaccactatgatcccgactatgaattcctccagcaagacctctctaacgcagaccagatacctcagcagacggcctggaaccttagcccgttgccagagtctttgggggagtctgggtctccatttcttggccctcctttccagctgcctcttggcggccatccccagccagacggacctctggccccagggcagcagacagatacgccacctgctctccccgagaagaagcgcaggagcgcagcctcccagacggcggacggctctggctgcagggtgtcctacgagcggcatccctcgcagtatgacaacatctctggggaggacctgcagagcacagccccgatcccatccgtcccctacgcgccctttgctgctattctgccctttcagcatggaggttcctcagcccctgtcgaatttgtgggtgattttactgctcctgagtcaaccggtgacccagaaaaaccacctcctctaccagagaagaaaaacaaacacatgctggcctacatgcagttgctggaggactactcggagccgcagccctctatgttctaccagacgccacagaacgagcacatctaccagcagaagaacaagctcctcatggaggtatacggcttcagcgactccttcagtggggtggactccgtgcaggagctggccccgccgcccgccctaccccccaagcagcggcagctggagccaccggctgggaaagacggacatcccagagatccctcagcggtcagcggcgtccctgggaaggacagcagagacggcagtgagagggccccaaagtcaccagatgctctggagtcggctcagtcggaggaggaagtggacgagctgtccctcattgaccacaacgaaattatgtccaggctgacgctcaagcaggagggtgatgacgggccggacgtccgcggaggatctggggacatcttactggtccatgctactgagactgacaggaaagatttggtgttgtactgcgaggcattcctgaccacctacaggaccttcatctccccagaggagctcatcaagaagctgcagtacagatatgagaaattctctccctttgccgacacattcaagaagcgcgtcagcaagaacacgttcttcgtgctggtacgggtggtggatgagctctgcctggtggagttgacagaagagatcctgaagctgctgatggaactggtcttccgcctggtgtgcaatggggagctgagcctggcccgtgtgctccggaagaacatcctggacaaggtggaccagaagaagctactcaggtgtgccacctccagccagcccctggcagcccggggggtagcagccaggccggggaccttgcacgactttcacagccatgagatagcggagcagctaacgctgctggatgctgagctcttctataaaatagagattcctgaggttttgctttgggcaaaagagcagaatgaggagaagagccccaacttgacccagttcacggagcacttcaacaacatgtcctactgggtccggtccataatcatgttacaggaaaaggcccaggacagggaacggctgctcttgaagttcatcaagatcatgaagcacttgcggaagctgaataacttcaactcctacttggccatcctctctgccctggactcggcgcccatccgcaggctggagtggcagaagcagacttcagagggcctggccgagtactgcacactgatcgacagctcgtcctccttccgagcctaccgggccgccctctcggaggtggaaccgccgtgcatcccgtacctggggctgatcctgcaggacctgaccttcgttcacctgggaaacccagactacatcgacgggaaagtgaacttctccaagcggtggcagcagttcaacatcctcgacagcatgcgctgcttccagcaggcgcactatgacatgcggaggaacgacgacattataaacttcttcaatgacttcagtgaccacctggctgaggaggccctatgggaactgtctctgaaaattaaacccaggaacataacaaggagaaaaacagaccgggaagagaagacctaggagcagacgccgggatccaggagaatgctcgaggggcgcagagggcagctcccagaccggagaggaccttggacctgttaggcgcatggcaggagtcccggcctcggagccatgaggctggccagccctcagcggggccgggcgggagctggagcctgccagccgcttcctgcctccttcctctgtgggagcagacccgtgggcctcagggcagccagcaggcaggtcttgttgccaatttacaaaccggtggttttctggtttggttttgttttctgcttttacttccatctctcccctcttgaccttccacccactcccctccagggagagagcagcagagacctcatcagcagaccaaggaagtggtgggtgctccccctccctaagctccagggtccctgaatcttctgaaatctcaaatgagtggaggcctcctggggtggcctgtcctgcaggggccctggaatgggggcaagcagctgggtgggcagaatgcagagtagactcgggggaggatcctttcactttccgcttccccttctgatgcatggaggatggtgtgagcttttcagcaggcccggaaaggtacgcaggtgacgccttagcagccccgcagctggtgctctgccccgcggtactggcgccatcagggcctcccttgcccgcctgagagcagcagcagtctctgtcatcccgtcgccccttaccccccaccccaggccactgggcccctcccacaccacctggggagctgagaagaggaggctggagtaagggaggacttgatcatccaagaaatactttttattgctgggagtcttctgaacctcaccaaactgaggccagagctgagctcctgggggagttaattcagaggggagaggccagcacctccctcctccatcgctcgctgtgtgccttaaactccatctcatgtccctccccatcccctggctttccctccctccttgccccatcctgggccagccagcagggctcctcctctggctcttcagacctttcagccagtgctgtcagtgcccctgggagggaagggcatccctgaggcacccgaatggtccctcagggtgcagggaggcagaagcctggccacagaggagcctcctaaggcagcagctgcagcaagcgcaccctctccccactctccccacgccagagcggcttccagagcagatgctgtttccatcctcctcgtcaaaaccattctcgctgctgagcttgacaatctgggcaaggcttgtggggcgcttgacaaacagaatctgccctgtgccgcctggttccgtggcctccagcatgagcctgcaggcagggcgctgcgggaacccagttgtgctgccccagcccatgcctccgggtctgctgtgcatgaatgagtgctcacttgtcccgggtttaggacgtggtcaagtgaacagcagggtctaactgtgcttacttagcccagttcaaacagaacaaaggaaaaatatagaaagcaacatctgttgatcatttaggtttttttttaaaccaccatgtcactttgagtccttcatgggtttttgaacagcatttatcaagaagaaaatgtgggctttttcccctctcccgtgttttgtttgtcctgtagatagagggaggaaagccgtgcagtggcaggcgggaccccctctggtggcgggaccccctcttgcggtggtcttgcggggccagccgggacctgtcactttattatttaaggagtgtgtgtgtagagtcgctggcttattaacagtattgtgtgtgggttgggtttttagtttgttccttctttttgaagtcccttcatttcaatccttgactctctctccccttcccttgcccagctctgttgaatgctgctgtgcgcgtgtgagggccgctctgcacacagggcccttgggttgtgtgaactgaaattctccctgtatttgtgagactcgcaggagtccccatctgtagcacaggcaatgccagtgccatgctgcagcctcagaaaccaggcctctcactccagcagcaggcagaaccgtgtctgtggtcgggtgctgtccacagctctgtctgccttgttcttgggcttgagctggatagaggtggggtctcttcaccttccctgaattcagaacagaccctgtgcctggccccagtgtgcccaggcaattccccaggccctcactgggagcccttggtgttctgagcagcagggcccaggcagcacatgagcagtgcccaggggctccctgcgtgaggacggcaaggtgcgatgtatgtctaacttattgatggcaggcagccccctgtgccccctaagcctggccctggttattgctgagctctgtgctcagtgctgcggcctggccgtggctcgtctgttcctttggggggcccgggcgggttgtgggaatcagtcttcacagacagacgtgagccaggcggaggactcgttccttgcagaggtcagtcctcacctgcaggtgtcggggtgggggggggcaaggaggggcaggcacacaccatgtctgacctgaacccgattctggggagcatcttcccgctccggccccacgacctccacagggttacattgtaatatatatgccccagctaacctgtctgatggtggcatcttcctgcagacatttcaaacatgtaacttttatatgaaaaaaaataaacacagatgaaagctgcccaatgccaaaaaaaaaaaaaaaaaaaaaaaaaaaaaaa

SEQ ID NO: 6911 - DNA, 1661 bp, Homo Sapiens
  NM_198723
cggccgctgggtccgtgaaggggagtgaggcactcctcaccctgtggcagctcctagtcaggaggcctctcccctccacctgcacgtcatgtggctgtggctcccaggaccagcgcctggagcgggtgagtgaacgtccctctcctccgtgggcactgcctccgctgtgagccacccttcaggctacgtgcatttccgcctgttctcagggtttaaccgaaaccgaacattaaccgtagccctaacgcggctgagggatccaggccttgcctctgggccgggtgagagacagacactcgccaaccagtccgcagtggctccccgtgtgtgcgaggctcccgcctgcgtgtgtgcgtgtgcatgtgtgcctgcgcacaggggagggaaagttcttcagctgccgagggcgggagtaggggctggagcagcaccctgcggcgaggccccacaggagaatcgatggttctgatgctgtcagcctctgggtgcaaattctgagggcccgggagcgtctggcggccctgagcagcttgctggggaagctccgtggaggaggaagtccggaggcatgtgatgtgaatcagctgacatcatcttgacgggagccctgtgaggcggacacttaactccagtttcacaggagggagccatggatttgctgcgggagctgaaggccatgcctatcacgctgcacctgctccagtccacccgagtcgggatgtctgtcaacgcccttcggaagcagagctcggatgaggaggtcattgcactggccaagtctctcatcaagtcctggaagaagctcctggatgcttccgatgccaaagccagggagcgggggaggggcatgcctctgcccacgtcctcgagggatgcctcagaggccccggatcccagccgcaagaggccggagctgcccagggcaccgtcgactccgaggatcaccacatttcctccggtgcctgtcacctgtgatgccgtgcgcaacaagtgccgcgagatgctgaccgctgccctgcagacggaccatgaccacgtggccatcggtgcggactgcgagcgcctgtcggctcagatcgaggaatgcatcttccgggacgttggaaacacagacatgaagtataagaaccgtgtacggagtcgtatctccaacctgaaggatgccaagaaccctgacctgcggcggaatgtgctgtgtggggccataacaccccagcagatcgctgtgatgacctcagaggagatggccagtgatgagctgaaggagatccgtaaggccatgaccaaggaggccatccgagagcaccagatggcccgcactggcggcacgcagacagacctgttcacctgcggcaagtgcaggaaaaagaactgcacctacacacaggtgcagacccgcagctctgatgagcccatgaccacctttgttgtctgcaacgagtgtggaaaccgctggaagttctgctgacccctcgtgtagatgtgctgcagccttgggccctccccggcccacgtcctccgttgacacagcttctctggagaccctagaaggcggcatgtcctgccctcaacctgcctgcctggattgcacctttctgccctttccccctcattattaaatgtttctttttgccaaaaaaaacaaaaaaaaaaaaaaaaaa

SEQ ID NO: 6912 - DNA, 5288 bp, Homo Sapiens
  NM_198793
ggggagcaggcgggggagcgggcgggaagcagtgggagcgcgcgtgcgcgcggccgtgcagcctgggcagtgggtcctgcctgtgacgcgcggcggcggtcggtcctgcctgtaacggcggcggcggctgctgctccagacacctgcggcggcggcggcgaccccgcggcgggcgcggagatgtggcccctggtagcggcgctgttgctgggctcggcgtgctgcggatcagctcagctactatttaataaaacaaaatctgtagaattcacgttttgtaatgacactgtcgtcattccatgctttgttactaatatggaggcacaaaacactactgaagtatacgtaaagtggaaatttaaaggaagagatatttacacctttgatggagctctaaacaagtccactgtccccactgactttagtagtgcaaaaattgaagtctcacaattactaaaaggagatgcctctttgaagatggataagagtgatgctgtctcacacacaggaaactacacttgtgaagtaacagaattaaccagagaaggtgaaacgatcatcgagctaaaatatcgtgttgtttcatggttttctccaaatgaaaatattcttattgttattttcccaatttttgctatactcctgttctggggacagtttggtattaaaacacttaaatatagatccggtggtatggatgagaaaacaattgctttacttgttgctggactagtgatcactgtcattgtcattgttggagccattcttttcgtcccaggtgaatattcattaaagaatgctactggccttggtttaattgtgacttctacagggatattaatattacttcactactatgtgtttagtacagcgattggattaacctccttcgtcattgccatattggttattcaggtgatagcctatatcctcgctgtggttggactgagtctctgtattgcggcgtgtataccaatgcatggccctcttctgatttcaggtttgagtatcttagctctagcacaattacttggactagtttatatgaaatttgtggcttccaatcagaagactatacaacctcctaggaataactgaagtgaagtgatggactccgatttggagagtagtaagacgtgaaaggaatacacttgtgtttaagcaccatggccttgatgattcactgttggggagaagaaacaagaaaagtaactggttgtcacctatgagacccttacgtgattgttagttaagtttttattcaaagcagctgtaatttagttaataaaataattatgatctatgttgtttgcccaattgagatccagttttttgttgttatttttaatcaattaggggcaatagtagaatggacaatttccaagaatgatgcctttcaggtcctagggcctctggcctctaggtaaccagtttaaattggttcagggtgataactacttagcactgccctggtgattacccagagatatctatgaaaaccagtggcttccatcaaacctttgccaactcaggttcacagcagctttgggcagttatggcagtatggcattagctgagaggtgtctgccacttctgggtcaatggaataataaattaagtacaggcaggaatttggttgggagcatcttgtatgatctccgtatgatgtgatattgatggagatagtggtcctcattcttgggggttgccattcccacattcccccttcaacaaacagtgtaacaggtccttcccagatttagggtacttttattgatggatatgttttccttttattcacataaccccttgaaaccctgtcttgtcctcctgttacttgcttctgctgtacaagatgtagcaccttttctcctctttgaacatggtctagtgacacggtagcaccagttgcaggaaggagccagacttgttctcagagcactgtgttcacacttttcagcaaaaatagctatggttgtaacatatgtattcccttcctctgatttgaaggcaaaaatctacagtgtttcttcacttcttttctgatctggggcatgaaaaaagcaagattgaaatttgaactatgagtctcctgcatggcaacaaaatgtgtgtcaccatcaggccaacaggccagcccttgaatggggatttattactgttgtatctatgttgcatgataaacattcatcaccttcctcctgtagtcctgcctcgtactccccttcccctatgattgaaaagtaaacaaaacccacatttcctatcctggttagaagaaaattaatgttctgacagttgtgatcgcctggagtacttttagacttttagcattcgttttttacctgtttgtggatgtgtgtttgtatgtgcatacgtatgagataggcacatgcatcttctgtatggacaaaggtggggtacctacaggagagcaaaggttaattttgtgcttttagtaaaaacatttaaatacaaagttctttattgggtggaattatatttgatgcaaatatttgatcacttaaaacttttaaaacttctaggtaatttgccacgctttttgactgctcaccaataccctgtaaaaatacgtaattcttcctgtttgtgtaataagatattcatatttgtagttgcattaataatagttatttcttagtccatcagatgttcccgtgtgcctcttttatgccaaattgattgtcatatttcatgttgggaccaagtagtttgcccatggcaaacctaaatttatgacctgctgaggcctctcagaaaactgagcatactagcaagacagctcttcttgaaaaaaaaaatatgtatacacaaatatatacgtatatctatatatacgtatgtatatacacacatgtatattcttccttgattgtgtagctgtccaaaataataacatatatagagggagctgtattcctttatacaaatctgatggctcctgcagcactttttccttctgaaaatatttacattttgctaacctagtttgttactttaaaaatcagttttgatgaaaggagggaaaagcagatggacttgaaaaagatccaagctcctattagaaaaggtatgaaaatctttatagtaaaattttttataaactaaagttgtaccttttaatatgtagtaaactctcatttatttggggttcgctcttggatctcatccatccattgtgttctctttaatgctgcctgccttttgaggcattcactgccctagacaatgccaccagagatagtgggggaaatgccagatgaaaccaactcttgctctcactagttgtcagcttctctggataagtgaccacagaagcaggagtcctcctgcttgggcatcattgggccagttccttctctttaaatcagatttgtaatggctcccaaattccatcacatcacatttaaattgcagacagtgttttgcacatcatgtatctgttttgtcccataatatgctttttactccctgatcccagtttctgctgttgactcttccattcagttttatttattgtgtgttctcacagtgacaccatttgtccttttctgcaacaacctttccagctacttttgccaaattctatttgtcttctccttcaaaacattctcctttgcagttcctcttcatctgtgtagctgctcttttgtctcttaacttaccattcctatagtactttatgcatctctgcttagttctattagttttttggccttgctcttctccttgattttaaaattccttctatagctagagcttttctttctttcattctctcttcctgcagtgttttgcatacatcagaagctaggtacataagttaaatgattgagagttggctgtatttagatttatcactttttaatagggtgagcttgagagttttctttctttctgttttttttttttgttttttttttttttttttttttttttttttttgactaatttcacatgctctaaaaaccttcaaaggtgattatttttctcctggaaactccaggtccattctgtttaaatccctaagaatgtcagaattaaaataacagggctatcccgtaattggaaatatttcttttttcaggatgctatagtcaatttagtaagtgaccaccaaattgttatttgcactaacaaagctcaaaacacgataagtttactcctccatctcagtaataaaaattaagctgtaatcaaccttctaggtttctcttgtcttaaaatgggtattcaaaaatggggatctgtggtgtatgtatggaaacacatactccttaatttacctgttgttggaaactggagaaatgattgtcgggcaaccgtttattttttattgtattttatttggttgagggatttttttataaacagttttacttgtgtcatattttaaaattactaactgccatcacctgctggggtcctttgttaggtcattttcagtgactaatagggataatccaggtaactttgaagagatgagcagtgagtgaccaggcagtttttctgcctttagctttgacagttcttaattaagatcattgaagaccagctttctcataaatttctctttttgaaaaaaagaaagcatttgtactaagctcctctgtaagacaacatcttaaatcttaaaagtgttgttatcatgactggtgagagaagaaaacattttgtttttattaaatggagcattatttacaaaaagccattgttgagaattagatcccacatcgtataaatatctattaaccattctaaataaagagaactccagtgttgctatgtgcaagatcctctcttggagcttttttgcatagcaattaaaggtgtgctatttgtcagtagccatttttttgcagtgatttgaagaccaaagttgttttacagctgtgttaccgttaaaggtttttttttttatatgtattaaatcaatttatcactgtttaaagctttgaatatctgcaatctttgccaaggtacttttttatttaaaaaaaaacataactttgtaaatattaccctgtaatattatatatacttaataaaacattttaagctattttgttgggctatttctattgctgctacagcagaccacaagcacatttctgaaaaatttaatttattaatgtatttttaagttgcttatattctaggtaacaatgtaaagaatgatttaaaatattaattatgaattttttgagtataatacccaataagcttttaattagagcagagttttaattaaaagttttaaatcagtc

SEQ ID NO: 6913 - DNA, 1137 bp, Homo Sapiens
  NM_198828
caaggagaagccgcagtacccgcggctcgggtgcagcgcgggagcacagtggagcgcagatcgcggacccgagcgggcatgtccccgcgcgcgggagcctccgtttgcggccgggcccgggcggctgtgaacttagcagcgggctcctgcggccccgtcactgccatgtagtcgctggcggggctccctgcagcccgggagcggcagtgccagtgagcctgagcccaggagcccgcgtcttccccgggaggcgctgagtgcgcgccgcgcccccgccgctcgggaggcactttgggccagacagggaaatgggggagaaagtttcggaggcgccagagccggtgccccgcggctgcagtggccacggcagccggactccagcctctgcgctggtcgccgcgtcctctccgggtgcttcctcggccgagtcctcctcgggctcagaaactctgtcggaggaaggggagcccggcggcttctccagagagcatcagccgccgccgccgccgccgttgggaggcaccctgggcgcccgggcgcccgccgcgtgggctccggcaagcgtgctgctggagcgcggagtccttgcgctgccgccgccgcttcccggaggagctgtgccgcccgcgccccggggcagcagcgcgtcccaggaggagcaggacgaggagcttgaccacatattatcccctccacccatgccgtttcggaaatgcagcaacccagatgtggcttctggccctggaaaatcactgaagtataaaagacagctgagtgaggatggaagacagctaaggcgagggagcctgggaggagccctgactgggaggtaccttcttccaaacccggtggcgggacaggcctggccggcctctgcagagacgtccaacctcgtgcgcatgcgcagccaggccctgggccagtcggcgccctcgctcaccgccagcctgaaggagctgagtctccccagaagaggaagtttgatagattcccagaagtggaattgcttggtcaaacgccctgtgtgtccaaatgctgggagaacatcaccccttggatgaattgccaccacattaaataaaacatatccaaagctcaaaaaaaaaaaaaaaaaaaaaaaaaaaaaaaaaaaaaaaa

SEQ ID NO: 6914 - DNA, 4420 bp, Homo Sapiens
  NM_198830
agccgatgggggcggggaaaagtccggctgggccgggacaaaagccggatcccgggaagctaccggctgctggggtgctccggattttgcggggttcgtcgggcctgtggaagaagcgccgcgcacggacttcggcagaggtagagcaggtctctctgcagccatgtcggccaaggcaatttcagagcagacgggcaaagaactcctttacaagttcatctgtaccacctcagccatccagaatcggttcaagtatgctcgggtcactcctgacacagactgggcccgcttgctgcaggaccacccctggctgctcagccagaacttggtagtcaagccagaccagctgatcaaacgtcgtggaaaacttggtctcgttggggtcaacctcactctggatggggtcaagtcctggctgaagccacggctgggacaggaagccacagttggcaaggccacaggcttcctcaagaactttctgatcgagcccttcgtcccccacagtcaggctgaggagttctatgtctgcatctatgccacccgagaaggggactacgtcctgttccaccacgaggggggtgtggacgtgggtgatgtggacgccaaggcccagaagctgcttgttggcgtggatgagaaactgaatcctgaggacatcaaaaaacacctgttggtccacgcccctgaagacaagaaagaaattctggccagttttatctccggcctcttcaatttctacgaggacttgtacttcacctacctcgagatcaatccccttgtagtgaccaaagatggagtctatgtccttgacttggcggccaaggtggacgccactgccgactacatctgcaaagtgaagtggggtgacatcgagttccctccccccttcgggcgggaggcatatccagaggaagcctacattgcagacctcgatgccaaaagtggggcaagcctgaagctgaccttgctgaaccccaaagggaggatctggaccatggtggccgggggtggcgcctctgtcgtgtacagcgataccatctgtgatctagggggtgtcaacgagctggcaaactatggggagtactcaggcgcccccagcgagcagcagacctatgactatgccaagactatcctctccctcatgacccgagagaagcacccagatggcaagatcctcatcattggaggcagcatcgcaaacttcaccaacgtggctgccacgttcaagggcatcgtgagagcaattcgagattaccagggccccctgaaggagcacgaagtcacaatctttgtccgaagaggtggccccaactatcaggagggcttacgggtgatgggagaagtcgggaagaccactgggatccccatccatgtctttggcacagagactcacatgacggccattgtgggcatggccctgggccaccggcccatccccaaccagccacccacagcggcccacactgcaaacttcctcctcaacgccagcgggagcacatcgacgccagcccccagcaggacagcatctttttctgagtccagggccgatgaggtggcgcctgcaaagaaggccaagcctgccatgccacaaggaaagagcaccaccctcttcagccgccacaccaaggccattgtgtggggcatgcagacccgggccgtgcaaggcatgctggactttgactatgtctgctcccgagacgagccctcagtggctgccatggtctaccctttcactggggaccacaagcagaagttttactgggggcacaaagagatcctgatccctgtcttcaagaacatggctgatgccatgaggaagcatccggaggtagatgtgctcatcaactttgcctctctccgctctgcctatgacagcaccatggagaccatgaactatgcccagatccggaccatcgccatcatagctgaaggcatccctgaggccctcacgagaaagctgatcaagaaggcggaccagaagggagtgaccatcatcggacctgccactgttggaggcatcaagcctgggtgctttaagattggcaacacaggtgggatgctggacaacatcctggcctccaaactgtaccgcccaggcagcgtggcctatgtctcacgttccggaggcatgtccaacgagctcaacaatatcatctctcggaccacggatggcgtctatgagggcgtggccattggtggggacaggtacccgggctccacattcatggatcatgtgttacgctatcaggacactccaggagtcaaaatgattgtggttcttggagagattgggggcactgaggaatataagatttgccggggcatcaaggagggccgcctcactaagcccatcgtctgctggtgcatcgggacgtgtgccaccatgttctcctctgaggtccagtttggccatgctggagcttgtgccaaccaggcttctgaaactgcagtagccaagaaccaggctttgaaggaagcaggagtgtttgtgccccggagctttgatgagcttggagagatcatccagtctgtatacgaagatctcgtggccaatggagtcattgtacctgcccaggaggtgccgcccccaaccgtgcccatggactactcctgggccagggagcttggtttgatccgcaaacctgcctcgttcatgaccagcatctgcgatgagcgaggacaggagctcatctacgcgggcatgcccatcactgaggtcttcaaggaagagatgggcattggcggggtcctcggcctcctctggttccagaaaaggttgcctaagtactcttgccagttcattgagatgtgtctgatggtgacagctgatcacgggccagccgtctctggagcccacaacaccatcatttgtgcgcgagctgggaaagacctggtctccagcctcacctcggggctgctcaccatcggggatcggtttgggggtgccttggatgcagcagccaagatgttcagtaaagcctttgacagtggcattatccccatggagtttgtgaacaagatgaagaaggaagggaagctgatcatgggcattggtcaccgagtgaagtcgataaacaacccagacatgcgagtgcagatcctcaaagattacgtcaggcagcacttccctgccactcctctgctcgattatgcactggaagtagagaagattaccacctcgaagaagccaaatcttatcctgaatgtagatggtctcatcggagtcgcatttgtagacatgcttagaaactgtgggtcctttactcgggaggaagctgatgaatatattgacattggagccctcaatggcatctttgtgctgggaaggagtatggggttcattggacactatcttgatcagaagaggctgaagcaggggctgtatcgtcatccgtgggatgatatttcatatgttcttccggaacacatgagcatgtaacagagccaggaaccctactgcagtaaactgaagacaagatctcttcccccaagaaaaagtgtacagacagctggcagtggagcctgctttatttagcaggggcctggaatgtaaacagccactggggtacaggcaccgaagaccaacatccacaggctaacaccccttcagtccacacaaagaagcttcatattttttttataagcatagaaataaaaaccaagccaatatttgtgactttgctctgctacctgctgtatttattatatggaagcatctaagtactgtcaggatggggtcttcctcattgtagggcgttaggatgttgctttctttttccattagttaaacatttttttctcctttggaggaagggaatgaaacatttatggcctcaagatactatacatttaaagcaccccaatgtctctctttttttttttttacttccctttcttcttccttatataacatgaagaacattgtattaatctgatttttaaagatctttttgtatgttacgtgttaagggcttgtttggtatcccactgaaatgttctgtgttgcagaccagagtctgtttatgtcagggggatggggccattgcatccttagccattgtcacaaaatatgtggagtagtaacttaatatgtaaagttgtaacatacatacatttaaaatggaaatgcagaaagctgtgaaatgtcttgtgtcttatgttctctgtatttatgcagctgatttgtctgtctgtaactgaagtgtgggtccaaggactcctaactactttgcatctgtaatccacaaagattctgggcagctgccacctcagtctcttctctgtattatcatagtctggtttaaataaactatatagtaacaaaaaaaaaaaaaaaaaaaaaaaaaaaaaaaaaaaaaaaaaaaaaaaaaaaaaaaaaaaaaaaaaaaaaaaaaaaaaaaaaaaaaaaaaaaaaaaaaaa

SEQ ID NO: 6915 - DNA, 3407 bp, Homo Sapiens
  NM_198833
caagccagagcaatcgaacggttctgagtcatctgccggaagccttgccctcaatcaaggcggacgtgaagcatctacaaaggaggaatagtcaaagcagcagcggcggcggcggcggcggcagcagcagcagcagcaggaggtgggggcctctgccagaccttctctgatggatgacctctgtgaagcaaatggcacttttgccatcagcttatttaaaatattgggggaagaggacaactcaagaaacgtattcttctctcccatgagcatctcctctgccctggccatggtcttcatgggggcaaagggaagcactgcagcccagatgtcccaggcactttgtttatacaaagacggagatattcaccgaggtttccagtcacttctcagtgaagttaacagaactggcactcagtacttgcttagaactgccaacagactctttggagaaaagacgtgtgatttccttccagactttaaagaatactgtcagaagttctatcaggcagagctggaggagttgtcctttgctgaagacactgaagagtgcaggaagcatataaatgactgggtggcagagaagactgaaggtaagatttcagaggtactggatgctgggacagtcgatcccctgacaaagctggtccttgtgaatgccatttatttcaagggaaagtggaatgagcaatttgacagaaagtacacaaggggaatgctctttaaaaccaacgaggaaaaaaagacagtgcagatgatgtttaaggaagctaagtttaaaatggggtatgcggatgaggtacacacccaggtcctggagctgccctatgtggaagaggagctgagcatggtcattctgcttcccgatgacaacacggacctcgccgtggtggaaaaagcacttacatatgagaaattcaaagcctggacaaattcagaaaagttgacaaaaagtaaggttcaagttttccttcccagattaaagctggaggagagttatgacttggagcctttccttcgaagattaggaatgatcgatgcttttgacgaagccaaggcagacttttctggaatgtcaactgagaagaatgtgcctctgtccaaggttgcccacaagtgcttcgtggaggtcaatgaggaaggcacagaggctgccgcagccactgctgtggtcaggaattcccggtgcagcagaatggagccaagattctgtgcagaccacccttttcttttcttcatcaggcaccacaaaaccaactgcatcttgttctgtggcaggttctcttctccgtaaagaggagcaattgctgtacataccctcctttccttctacctatcttgccttaattaacattccctgtgacctagttggtgcagtggcttgaatgccaaaataaagcgtgtgcactggatagtgtgtgaaagtctttgctgaaagttccagagccattgagaataactgaggccgcagatgcatgaaatttgggcctgggaaggctatgctggttttggagtgtttggggtgcctgccattgcctctgccttcacctaagtctgtgcccattgtttcaggggatcttatggagcatctcagggcttcaggagccagccctcttccatccgcccggctctgcccaccaccactgccaggctgaacaggggactagtgcccaggtgacactgcacacaaagccaagggcaaaccctatagagtaaagctgcagccaccctgtgtctcatgtgcagctgaaatagtgatctgcttctgtcactgtcacatagacagccctgcatgccccctgtctcacacagtttgtaatgaagacagctccttctcatctttccataagcctgagatacaagttcagggactcagcaatgcactttaggactgagctaggaggcaaatatctgaagcttgctatgctgttctttccattccttttccctctgaaacacacaaaataccaaaggaacttacgcaacacaccactgagtcctctaactaatcatatgtgctcagacacagctcaagcacaccccttagttaagaaagaacctccatatacattaatttttttctgcctaaaaataaaattgcgttgtggcagcaatttggaaactacagcaaagtctccaaaaaaattgaagtcacccacaattccaacacacagcaatcactgctgttaatagtgatatacatccttccctattatgtgtatgcaaatagaaatttataagcattttactacaagttaatcatatccttcagtagcttatttcttcccttatgaaaaacctcccttaagatctttccaggtcatcaatttgatgtgcatagtattccactgtgtggctggatttctataattgaatctaattttagacagtttgagtaattaaaattatttctattaacaaataatagattgctaataatatatattatgctgttttggatatactaaatatttgctcacatccttaatatattttttaaaattcctaacaatagtactgttgagataaaagttgagcacattttgagacttcttccaaattggtccctagaaagttacactggtttgtactctcacttatgtcactgtttataccaccactgactgctgcctgctttattatttctttaatgagttggactgaacagtggttaatcctgactctgtttttgactgacagttaacagttacatgaaccattcatattacagctcttacttaaatttgaccaagccaggatatatctgttaggccacattcatttagggatcatgttttccaaagcaggtttgggcaaaattaatccacaggactgaaaggtatacatctgtgagttttgttctcacttccacctctaatttgaagaacactttaattgacacagaatacatttcacatatttaacctctacaataagttctgacacattttccatgaaacaaaccatcgctatattcaagataatgaacctatctatcatactcccaaattccttcttgcatctttgtaatttctcactcttccttctccctctccccgtcccatcccaaccactgatctgctcaggcaactaccaatcttctttctgtcactatagattaatttgcatttttaaagaaatttacatacatggaaccatacatcatctatgctttgtagtatgactcctgtcactcagtacaattattttgagattcatttatgttattgtatgtatcaatagttcatcccttttattggtaagtaacatttttttgtataggtataccatgatttgttgatgaacaaatttacctgttgatgaacatttacgttgttaccaagatttttgctattgaaaataaagtttttatgaatatttatatatataaaaaaaaaaaaaaaaaa

SEQ ID NO: 6916 - DNA, 9585 bp, Homo Sapiens
  NM_198836
cggcctggtgctgcacgcctgtcagccatcgcccgagccgccggcgtctcctcccgcccagcagttcctccacgcaggggctccggaatcgcccgaccgcacacgttgccaccctgaggtctttctggaagtggatatctactcagacagtaagaattataagagctgtaagagctcattttggaggaataatggatgaaccatctcccttggcccaacctctggagctgaaccagcactctcgattcataataggttctgtgtctgaagataactcagaggatgagatcagcaacctggtgaagttggacctactggaggagaaggagggctccttgtcacctgcttctgttggctcagatacactctctgatttggggatctctagcctacaggatggcttggccttgcacataaggtccagcatgtctggcttgcacctagtaaagcagggccgagacagaaagaaaatagattctcaacgagatttcactgtggcttctccagcagaatttgttactcgctttgggggaaataaagtgattgagaaggttcttattgctaacaatggcattgcagcagtgaaatgcatgcggtctatccgtaggtggtcttatgaaatgtttcgaaatgaacgtgcaattagattcgttgtcatggtcacacctgaagaccttaaagccaatgcagaatacattaagatggcagatcactatgtgccagtgcctggaggaccaaacaacaacaactatgcaaatgtggaattaattcttgatattgctaaaaggatcccagtacaagcagtgtgggctggctggggtcatgcttctgagaatcccaaactaccggaacttctcttgaaaaatggcattgccttcatgggtcctccaagccaggccatgtgggctttaggggataagattgcatcttccatagtggctcaaactgcaggtatcccaactcttccctggagcggcagtggtcttcgtgtggactggcaggaaaatgatttttcaaaacgtatcttaaatgttccccaggagctatatgaaaaaggttatgtgaaagatgtggatgatgggctacaggcagctgaggaagttggatatccagtaatgatcaaggcctcagagggaggaggagggaagggaattagaaaagtcaacaatgcagatgacttccctaatctcttcagacaggttcaagctgaagttcctggatctcccatatttgtgatgagactagccaaacaatctcgtcatctggaggtgcagatcttagcggaccaatatggcaatgctatctctttgtttggtcgtgattgctctgtacaacgcaggcatcagaagattattgaagaagcacctgctactattgctactccagcagtatttgaacacatggaacagtgtgcggtgaaacttgccaaaatggtgggttatgtgagtgctgggactgtggaatacctgtacagccaggatggcagcttctactttctggaattgaatcctcggctgcaggtagagcacccttgtacagagatggtggctgatgtcaatctccctgcagcacagctccagattgccatggggattcctctatatagaatcaaggatatccgtatgatgtatggggtatctccctggggtgattctcccattgattttgaagattctgcacacgttccttgtccaaggggccatgttattgctgctcggatcactagtgaaaatccagatgagggttttaagcccagctcaggaacagttcaggagctaaatttccgcagcaataagaatgtttggggatatttcagtgttgctgctgcagggggacttcatgaatttgctgattctcagtttggtcactgcttttcttggggagaaaacagagaagaggcaatttcaaacatggtggtggctttgaaggagctgtctattcggggtgactttcgaactacagttgaatacctgatcaaattgttagagactgaaagctttcagatgaacagaattgatactggctggctggacagactgatagcagaaaaagtacaggctgagcgacctgacaccatgttgggggttgtgtgtggtgccctccacgtggcagatgtgagcctgcggaatagcgtctctaacttccttcactccttagaaaggggtcaagtccttcctgctcatacacttctgaatacagtagatgttgaacttatctatgagggagtcaagtatgtacttaaggtgactcgacagtcccccaactcctatgtggtgatcatgaatggctcatgtgtagaagtagatgtacatcggctgagtgacggtggactgctcttgtcctatgatggcagcagttatactacgtatatgaaagaggaagtggatagatatcgcatcacaattggcaataaaacctgtgtgtttgagaaggaaaatgacccatcggtgatgcgctcaccttctgctgggaagttaatccagtacattgtagaagatggaggtcatgtgtttgccggccagtgctatgctgagattgaggtaatgaagatggtaatgaccttaacagctgtggagtctggctgtatccattacgtcaagcgacctggagcagctcttgaccctggctgtgtactagccaaaatgcaactggacaaccccagcaaggttcagcaggctgaacttcacacaggtagtctgccacggatccagagcacggcactcagaggcgagaaactccatcgagtgttccattatgtcctggataatctggtcaatgtaatgaatggatactgccttccagatcctttctttagcagcaaggtaaaagactgggtagagcgattgatgaaaaccctcagagatccctccctgcctctcctagaattgcaagatattatgaccagtgtgtctggccgcattccccccaatgtggagaagtctatcaagaaggaaatggctcagtatgctagcaacatcacatcagtcctctgtcagtttcccagccagcagattgcaaacatcctagatagccatgcagctacattgaaccggaaatctgaacgggaagtcttctttatgaatactcagagcattgttcagctggtacagaggtaccgaagtggcatccgaggccacatgaaggctgtggtgatggatctgctccggcagtacctgcgagtagagacacaattccagaatggtcactatgacaaatgtgtattcgccctccgagaagagaataaaagtgacatgaacactgtactgaactacatcttctctcacgctcaagtcaccaagaagaatcttctggtcacaatgcttattgatcagttgtgtggccgggaccctactctcactgatgagctgctgaatattctcacagagctaactcaactcagtaagaccaccaatgccaaagtagcacttcgagcacgccaggttcttattgcctcccatttgccatcatatgagcttcgccataaccaagtagagtctatcttcctatcagctattgacatgtatggacatcaattttgcattgagaacctgcagaaactcatcctatcagaaacatctatttttgatgtcctaccaaacttcttctatcacagcaaccaagtagtgaggatggcagctctggaggtgtatgttcgaagggcttatattgcctatgaacttaacagcgtacaacaccgccagcttaaggacaacacctgtgtggtggaattccagttcatgctgcccacatctcatccaaacagagggaacatccctacgctaaacagaatgtccttctcctccaacctcaaccactatggcatgacccatgtagctagtgtcagcgatgtactgttggacaactcattcactccaccttgtcagcggatgggcggaatggtctcttttcggacttttgaagattttgtcaggatctttgatgaagtgatgggctgcttctctgactccccaccccagagtcccacattccctgaggcaggtcacacgtctctttatgatgaggataaggttcccagggatgaaccaattcacattctcaatgtggctatcaagactgactgtgatattgaggatgacaggctggcagctatgttcagagaatttacccagcaaaataaagctaccctggttgaccatgggatccggcgccttactttcctggttgcacaaaaggatttcagaaagcaggtcaactatgaggtggatcggagatttcatagagaattccctaaattttttacattccgagcaagggataagtttgaggaggatcgtatctatcgtcatctggagcctgctctggctttccagttagagctgaaccggatgagaaattttgacctcactgccattccatgtgctaatcacaagatgcacctgtatctcggggcagccaaggtggaagtgggcacagaagtgacagactacaggttctttgttcgtgcaatcatcaggcattctgatctggtcaccaaggaagcttcttttgaatatctgcaaaatgaaggggagcggctactcctggaagccatggatgagttggaagttgcttttaacaatacaaatgtccgcactgactgtaaccacatcttcctcaactttgtgcccacggttatcatggacccatcaaagattgaggaatccgtgcggagcatggtaatgcggtatggaagtcgcctgtggaaattgcgcgtcctccaggcagaactgaaaatcaacattcgcctgacgccaactggaaaagcaattcccatccgcctcttcctgacaaacgagtctggctattacttggatatcagcctatacaaggaagtgactgactccaggacagcacagatcatgtttcaggcatatggagacaaacagggaccactgcatggaatgttaatcaatactccatatgtgaccaaagacctgctgcaatcaaagaggttccaggcacaatccttagggacaacatacatatatgatatcccagagatgtttcggcagtccctgatcaaactctgggagtctatgtccactcaagcatttcttccatctccccctctgccttctgacatgctgacttacactgaactggtactggatgatcaaggtcagctggtccacatgaacaggcttccaggaggaaatgagattggcatggtagcttggaaaatgacctttaaaagtcctgaatatccagaaggccgagatatcattgttattggcaatgacatcacataccgaattgggtcctttgggcctcaagaggatttgttatttctcagagcttccgaacttgctagggcagaaggtattccacgcatctatgtatcagccaacagtggagcaagaatcggactggcagaagaaattcgccatatgtttcatgtggcctgggtagatcctgaggatccttacaagggatacaggtatttatatctgactcctcaagattataagagagtcagtgctctcaactctgtccattgtgaacacgtggaagatgaaggagaatccaggtacaagataacagatattattgggaaagaagagggaattggacccgagaaccttcgaggttctggaatgattgctggagaatcctcattggcctataatgagatcattaccatcagcctggtgacgtgccgggccattgggattggggcttaccttgtccggctgggacagagaaccatccaggttgagaattctcacttaattctaacaggagctggagccctcaacaaagtcctcgggcgggaagtgtacacctccaataaccagctggggggcatccagattatgcacaacaatggggtgacccactgcactgtgtgtgatgactttgaaggggttttcactgtcctgcactggctgtcttacatgcccaagagcgtgcacagttcagttcctcttctgaactcaaaggatcctatagacagaatcatcgagtttgttcccacaaagaccccatacgatcctcgatggatgctagcaggccgtcctcacccaacccaaaaaggtcagtggttgagtggcttttttgactatggatctttctcagagattatgcagccctgggcacagactgtggtggttggtagagccaggctaggaggaatacctgtgggagttgttgctgtagaaacccgaacagtagaactaagtatcccagctgatccagcaaacctggattctgaagccaagataatccagcaggctggccaggtttggttcccagattctgcgtttaagacgtatcaggccatcaaggacttcaaccgggaagggctgcctctgatggtctttgccaactggagaggcttctctggtggaatgaaagatatgtacgaccaagtgctgaagtttggtgcttacattgtggatggcttgagggagtgctgccagcctgtgctggtttacattcctccccaggctgagctgcggggtggctcctgggtggtgattgactcctccatcaacccccggcacatggagatgtatgctgaccgagaaagcaggggatctgttctggagccagaagggacagtagaaatcaaattccgcagaaaggatctggtgaaaaccatgcgtcgggtggacccagtctacatccacttggctgagcgattggggaccccagagctaagcacagctgagcggaaggagttggagaacaagttgaaggagcgggaggaattcctaattcccatttaccatcaggtagccgtgcagtttgctgacttgcacgacacaccaggccggatgcaggagaagggtgttattagcgatatcctggattggaaaacatcccgtaccttcttctactggcggctgaggcgtcttctgctggaggacctggtcaagaagaaaatccacaatgccaaccctgagctgactgatggccagattcaagccatgttaaggcgctggtttgtggaagtggaaggaacagtgaaggcttatgtttgggacaataataaggatctggcggagtggctagagaaacagctgacagaggaggatggtgttcactcggtaatagaggaaaacatcaaatgcatcagcagagactacgtcctcaagcaaatccgcagcttggtccaggccaatccagaggttgccatggattccatcatccatatgacgcagcacatatcacccactcagcgagcagaagtcatacggatcctctccacaatggattccccttccacgtaggaagagcttcctgcctgtccctgccctgtctctggagaaaagggctagagctgccttttacaactgtaaccactgtaatgagaaggcacaggagacccagcactggagtcaaatggcattttacttcctctcgtttcaggttatgcatgacatcctgggatgtaagatcacagaatccccctccagcccaccagtcacacctaccccattcagtatttattaccctggccaggcctagtcctccactccctgcacaggactgagaaggcaatgaaaggtacaaacatgtaccatgaggtcttactaaccaaagtagggctgcccctcctgtcctgacagccccttggcctcccagcatggggaagcgtgaggagttgcccagcagtgagcagcccccctcactcctggccccatgagccgcagccacaggcagcagaggagggctaaggagaggaggaagcctcaagtccattgtttattaccccgactcttagcccagcacacagtaggcactggagaggaatgattcccagtttaaccacactacggtaccttttatgaagaaaaattagagcataaaatctactacaagctccataggaactcaaagatgagggcaaaactgtgagccaagaagcagagaaagaaaatagaaccagttattcttgatttaggggacctcaaccttgggttcagtctctgaggacaaagggaaaggtagttgttggcctgcctctcgcctgcacgtcactgctggactagctgtcgcatgtggctgggagctgcaaggccagtgcttgaggggccccagcagttccacaggtggtgaagcctgagttggcagaggaggagccagaagagaactgccctttctgcactggtggaaactagttatttatgccatgtggagagccagtgagatagatagatagtctgtttgttttgaggacttggaaagttgttcctatgaagcctggagcttggatggttttgagaggttaatggtgcctccacactcactcttccctagttccaggattactgtcctagcagctaacggttctactctcttccccagagtgtagacaggcagcaggtctccccacagctctgaaaggaccctggtgacagctacaccctcagcaccaggagctggccttcctgatgagggaggcttccaggaaacacagaatccacatgaccttaagattatttacaactcagtcatggtgctgctgtcctccaggcttactggcccctcctgactggcatcaggggcttcctcaggtggtggagagagtttactttcaacaactagtttattcaagaaaagaacttactgattcctctgttcctaaagcaagagtggcaggtgatcagggctggtgtagcatccggttcctttagtgcagctaactgcatttgtcactgatgaccaaggaggaaatcactaagacatttgagaagcagtggtatgaacgttcttggacaagccacagttctgagccttaaccctgtagtttgcacacaagaacgagctccacctccccttcttcaggaggaatctgtgcggatagattggctggacttttcaatggttctgggttgcaggtgggcactgtatggctgggtatggagcggacagcccccaggagtcagagcctcagcccggctgccctggtggaaggtacaggtgttcagcaccttcagaaaagggcataaagtggtgggggacaattctcagtccaggaaaatgcattgaccattgctggctatttgcttacctagtaagaattggattcatttttgaccagattattcttctatgcttttttgcaataaatcaaatcccacatatctacaagtggtatgaagtcctgcaccccccaggaggcctgtccaggcatgtcttcagaggcagggtgggttacactcatttacctcccctctccccaccaaattatgacacaaacgagtatgtttcctctctagaaccctgtaatgcctcctcccccatccccagagctccttactgtaggtcttaccctggacaaggattttttcaagttggaggcacagaacatgagcaatctgacattcccacagcccctcaaacatgcaaggctactaaggcaggaggagtataaatgatggatattgaccaagacctgcttggacggagaccgccatattatctgttctcttcgttcacaaaacagccttcacttgtctcagaatttgatggacacatactgtgatgagcaggagcttcagatgcactctttacacattttgttgaaataaacctctacatttgtagaagaaaaaaaaaaaaaaaaaaaaaaaaaaaaaa

SEQ ID NO: 6917 - DNA, 10692 bp, Homo Sapiens
  NM_198839
ggcccccgccgggtgctgagcgcccgccaccgccctcttggccttttcccggtccccgccgcgcgcctgctgctgtccccgtgcccgaggactgggaggatggggctgagccgcttgcctgacttttgatccgaccagtaatcactttgcccgtgtggcgcgtggcccgttgcctgaggcttcctggcgcgtggggctgtttggtcccctccggagtgcggtgaggcgggccgagccgggactgcctgggtttggggataacgttcccatctccacccctgttgcagcaagggaaattgaggctgagggaactgggcccagggacggcgagccgtggctgcctctccagtccgggccccgaagggctgctcgtggatgaaccagactgattttaaggggtgaagagggtgcgtttcaatcagatgcttctggaacgtcgaaattgtcttctttggaaagaaccatcccctctttgggcttcagaggcccaaattgaggcgcaatgatgagaggatgtggtggtctactctgatgtcaatcttgagggctagggtcttgctatgtcacccagcctggagtggaattgtgtgatcaagactcactgaagcctccaactcctgggctcaagcaatcctcccacctcagccacccaagtagctgggactacaggctggagtgcaatggcatgatcttggctcactgcaacctccgcctcccggattcaacggattctcctgcctcagcctcctgagtagctgggattataggtgcctgccacaacacccaggaccagacttatgaagtggccttcctgaggagattttctgaccttatggtatgaagttccttcaggctcttaattctggataaactggagtgattaacaagagcaaagagacatagtattcagataaggactttgtgtcttatttttcttttatatcacaactggagccacagttgtgggcaaggcactgactttcttgatgaattctgtccatctgtaaagcagctatatatcccactggaggctttgcctctcagagacaacgtgaagacggataagcaggcatcaggagcagagtggcctctcagctggtcagattctccgaagaaggatcctctaggctgggcacggtggctcacacctataatcccagcactttgggaggccgaggcaggtggatcacgaggtcaggagttcgaggccagcctggccaatatggtctttctggaagtggatatctactcagacagtaagaattataagagctgtaagagctcattttggaggaataatggatgaaccatctcccttggcccaacctctggagctgaaccagcactctcgattcataataggttctgtgtctgaagataactcagaggatgagatcagcaacctggtgaagttggacctactggaggagaaggagggctccttgtcacctgcttctgttggctcagatacactctctgatttggggatctctagcctacaggatggcttggccttgcacataaggtccagcatgtctggcttgcacctagtaaagcagggccgagacagaaagaaaatagattctcaacgagatttcactgtggcttctccagcagaatttgttactcgctttgggggaaataaagtgattgagaaggttcttattgctaacaatggcattgcagcagtgaaatgcatgcggtctatccgtaggtggtcttatgaaatgtttcgaaatgaacgtgcaattagattcgttgtcatggtcacacctgaagaccttaaagccaatgcagaatacattaagatggcagatcactatgtgccagtgcctggaggaccaaacaacaacaactatgcaaatgtggaattaattcttgatattgctaaaaggatcccagtacaagcagtgtgggctggctggggtcatgcttctgagaatcccaaactaccggaacttctcttgaaaaatggcattgccttcatgggtcctccaagccaggccatgtgggctttaggggataagattgcatcttccatagtggctcaaactgcaggtatcccaactcttccctggagcggcagtggtcttcgtgtggactggcaggaaaatgatttttcaaaacgtatcttaaatgttccccaggagctatatgaaaaaggttatgtgaaagatgtggatgatgggctacaggcagctgaggaagttggatatccagtaatgatcaaggcctcagagggaggaggagggaagggaattagaaaagtcaacaatgcagatgacttccctaatctcttcagacaggttcaagctgaagttcctggatctcccatatttgtgatgagactagccaaacaatctcgtcatctggaggtgcagatcttagcggaccaatatggcaatgctatctctttgtttggtcgtgattgctctgtacaacgcaggcatcagaagattattgaagaagcacctgctactattgctactccagcagtatttgaacacatggaacagtgtgcggtgaaacttgccaaaatggtgggttatgtgagtgctgggactgtggaatacctgtacagccaggatggcagcttctactttctggaattgaatcctcggctgcaggtagagcacccttgtacagagatggtggctgatgtcaatctccctgcagcacagctccagattgccatggggattcctctatatagaatcaaggatatccgtatgatgtatggggtatctccctggggtgattctcccattgattttgaagattctgcacacgttccttgtccaaggggccatgttattgctgctcggatcactagtgaaaatccagatgagggttttaagcccagctcaggaacagttcaggagctaaatttccgcagcaataagaatgtttggggatatttcagtgttgctgctgcagggggacttcatgaatttgctgattctcagtttggtcactgcttttcttggggagaaaacagagaagaggcaatttcaaacatggtggtggctttgaaggagctgtctattcggggtgactttcgaactacagttgaatacctgatcaaattgttagagactgaaagctttcagatgaacagaattgatactggctggctggacagactgatagcagaaaaagtacaggctgagcgacctgacaccatgttgggggttgtgtgtggtgccctccacgtggcagatgtgagcctgcggaatagcgtctctaacttccttcactccttagaaaggggtcaagtccttcctgctcatacacttctgaatacagtagatgttgaacttatctatgagggagtcaagtatgtacttaaggtgactcgacagtcccccaactcctatgtggtgatcatgaatggctcatgtgtagaagtagatgtacatcggctgagtgacggtggactgctcttgtcctatgatggcagcagttatactacgtatatgaaagaggaagtggatagatatcgcatcacaattggcaataaaacctgtgtgtttgagaaggaaaatgacccatcggtgatgcgctcaccttctgctgggaagttaatccagtacattgtagaagatggaggtcatgtgtttgccggccagtgctatgctgagattgaggtaatgaagatggtaatgaccttaacagctgtggagtctggctgtatccattacgtcaagcgacctggagcagctcttgaccctggctgtgtactagccaaaatgcaactggacaaccccagcaaggttcagcaggctgaacttcacacaggtagtctgccacggatccagagcacggcactcagaggcgagaaactccatcgagtgttccattatgtcctggataatctggtcaatgtaatgaatggatactgccttccagatcctttctttagcagcaaggtaaaagactgggtagagcgattgatgaaaaccctcagagatccctccctgcctctcctagaattgcaagatattatgaccagtgtgtctggccgcattccccccaatgtggagaagtctatcaagaaggaaatggctcagtatgctagcaacatcacatcagtcctctgtcagtttcccagccagcagattgcaaacatcctagatagccatgcagctacattgaaccggaaatctgaacgggaagtcttctttatgaatactcagagcattgttcagctggtacagaggtaccgaagtggcatccgaggccacatgaaggctgtggtgatggatctgctccggcagtacctgcgagtagagacacaattccagaatggtcactatgacaaatgtgtattcgccctccgagaagagaataaaagtgacatgaacactgtactgaactacatcttctctcacgctcaagtcaccaagaagaatcttctggtcacaatgcttattgatcagttgtgtggccgggaccctactctcactgatgagctgctgaatattctcacagagctaactcaactcagtaagaccaccaatgccaaagtagcacttcgagcacgccaggttcttattgcctcccatttgccatcatatgagcttcgccataaccaagtagagtctatcttcctatcagctattgacatgtatggacatcaattttgcattgagaacctgcagaaactcatcctatcagaaacatctatttttgatgtcctaccaaacttcttctatcacagcaaccaagtagtgaggatggcagctctggaggtgtatgttcgaagggcttatattgcctatgaacttaacagcgtacaacaccgccagcttaaggacaacacctgtgtggtggaattccagttcatgctgcccacatctcatccaaacagagggaacatccctacgctaaacagaatgtccttctcctccaacctcaaccactatggcatgacccatgtagctagtgtcagcgatgtactgttggacaactcattcactccaccttgtcagcggatgggcggaatggtctcttttcggacttttgaagattttgtcaggatctttgatgaagtgatgggctgcttctctgactccccaccccagagtcccacattccctgaggcaggtcacacgtctctttatgatgaggataaggttcccagggatgaaccaattcacattctcaatgtggctatcaagactgactgtgatattgaggatgacaggctggcagctatgttcagagaatttacccagcaaaataaagctaccctggttgaccatgggatccggcgccttactttcctggttgcacaaaaggatttcagaaagcaggtcaactatgaggtggatcggagatttcatagagaattccctaaattttttacattccgagcaagggataagtttgaggaggatcgtatctatcgtcatctggagcctgctctggctttccagttagagctgaaccggatgagaaattttgacctcactgccattccatgtgctaatcacaagatgcacctgtatctcggggcagccaaggtggaagtgggcacagaagtgacagactacaggttctttgttcgtgcaatcatcaggcattctgatctggtcaccaaggaagcttcttttgaatatctgcaaaatgaaggggagcggctactcctggaagccatggatgagttggaagttgcttttaacaatacaaatgtccgcactgactgtaaccacatcttcctcaactttgtgcccacggttatcatggacccatcaaagattgaggaatccgtgcggagcatggtaatgcggtatggaagtcgcctgtggaaattgcgcgtcctccaggcagaactgaaaatcaacattcgcctgacgccaactggaaaagcaattcccatccgcctcttcctgacaaacgagtctggctattacttggatatcagcctatacaaggaagtgactgactccaggacagcacagatcatgtttcaggcatatggagacaaacagggaccactgcatggaatgttaatcaatactccatatgtgaccaaagacctgctgcaatcaaagaggttccaggcacaatccttagggacaacatacatatatgatatcccagagatgtttcggcagtccctgatcaaactctgggagtctatgtccactcaagcatttcttccatctccccctctgccttctgacatgctgacttacactgaactggtactggatgatcaaggtcagctggtccacatgaacaggcttccaggaggaaatgagattggcatggtagcttggaaaatgacctttaaaagtcctgaatatccagaaggccgagatatcattgttattggcaatgacatcacataccgaattgggtcctttgggcctcaagaggatttgttatttctcagagcttccgaacttgctagggcagaaggtattccacgcatctatgtatcagccaacagtggagcaagaatcggactggcagaagaaattcgccatatgtttcatgtggcctgggtagatcctgaggatccttacaagggatacaggtatttatatctgactcctcaagattataagagagtcagtgctctcaactctgtccattgtgaacacgtggaagatgaaggagaatccaggtacaagataacagatattattgggaaagaagagggaattggacccgagaaccttcgaggttctggaatgattgctggagaatcctcattggcctataatgagatcattaccatcagcctggtgacgtgccgggccattgggattggggcttaccttgtccggctgggacagagaaccatccaggttgagaattctcacttaattctaacaggagctggagccctcaacaaagtcctcgggcgggaagtgtacacctccaataaccagctggggggcatccagattatgcacaacaatggggtgacccactgcactgtgtgtgatgactttgaaggggttttcactgtcctgcactggctgtcttacatgcccaagagcgtgcacagttcagttcctcttctgaactcaaaggatcctatagacagaatcatcgagtttgttcccacaaagaccccatacgatcctcgatggatgctagcaggccgtcctcacccaacccaaaaaggtcagtggttgagtggcttttttgactatggatctttctcagagattatgcagccctgggcacagactgtggtggttggtagagccaggctaggaggaatacctgtgggagttgttgctgtagaaacccgaacagtagaactaagtatcccagctgatccagcaaacctggattctgaagccaagataatccagcaggctggccaggtttggttcccagattctgcgtttaagacgtatcaggccatcaaggacttcaaccgggaagggctgcctctgatggtctttgccaactggagaggcttctctggtggaatgaaagatatgtacgaccaagtgctgaagtttggtgcttacattgtggatggcttgagggagtgctgccagcctgtgctggtttacattcctccccaggctgagctgcggggtggctcctgggtggtgattgactcctccatcaacccccggcacatggagatgtatgctgaccgagaaagcaggggatctgttctggagccagaagggacagtagaaatcaaattccgcagaaaggatctggtgaaaaccatgcgtcgggtggacccagtctacatccacttggctgagcgattggggaccccagagctaagcacagctgagcggaaggagttggagaacaagttgaaggagcgggaggaattcctaattcccatttaccatcaggtagccgtgcagtttgctgacttgcacgacacaccaggccggatgcaggagaagggtgttattagcgatatcctggattggaaaacatcccgtaccttcttctactggcggctgaggcgtcttctgctggaggacctggtcaagaagaaaatccacaatgccaaccctgagctgactgatggccagattcaagccatgttaaggcgctggtttgtggaagtggaaggaacagtgaaggcttatgtttgggacaataataaggatctggcggagtggctagagaaacagctgacagaggaggatggtgttcactcggtaatagaggaaaacatcaaatgcatcagcagagactacgtcctcaagcaaatccgcagcttggtccaggccaatccagaggttgccatggattccatcatccatatgacgcagcacatatcacccactcagcgagcagaagtcatacggatcctctccacaatggattccccttccacgtaggaagagcttcctgcctgtccctgccctgtctctggagaaaagggctagagctgccttttacaactgtaaccactgtaatgagaaggcacaggagacccagcactggagtcaaatggcattttacttcctctcgtttcaggttatgcatgacatcctgggatgtaagatcacagaatccccctccagcccaccagtcacacctaccccattcagtatttattaccctggccaggcctagtcctccactccctgcacaggactgagaaggcaatgaaaggtacaaacatgtaccatgaggtcttactaaccaaagtagggctgcccctcctgtcctgacagccccttggcctcccagcatggggaagcgtgaggagttgcccagcagtgagcagcccccctcactcctggccccatgagccgcagccacaggcagcagaggagggctaaggagaggaggaagcctcaagtccattgtttattaccccgactcttagcccagcacacagtaggcactggagaggaatgattcccagtttaaccacactacggtaccttttatgaagaaaaattagagcataaaatctactacaagctccataggaactcaaagatgagggcaaaactgtgagccaagaagcagagaaagaaaatagaaccagttattcttgatttaggggacctcaaccttgggttcagtctctgaggacaaagggaaaggtagttgttggcctgcctctcgcctgcacgtcactgctggactagctgtcgcatgtggctgggagctgcaaggccagtgcttgaggggccccagcagttccacaggtggtgaagcctgagttggcagaggaggagccagaagagaactgccctttctgcactggtggaaactagttatttatgccatgtggagagccagtgagatagatagatagtctgtttgttttgaggacttggaaagttgttcctatgaagcctggagcttggatggttttgagaggttaatggtgcctccacactcactcttccctagttccaggattactgtcctagcagctaacggttctactctcttccccagagtgtagacaggcagcaggtctccccacagctctgaaaggaccctggtgacagctacaccctcagcaccaggagctggccttcctgatgagggaggcttccaggaaacacagaatccacatgaccttaagattatttacaactcagtcatggtgctgctgtcctccaggcttactggcccctcctgactggcatcaggggcttcctcaggtggtggagagagtttactttcaacaactagtttattcaagaaaagaacttactgattcctctgttcctaaagcaagagtggcaggtgatcagggctggtgtagcatccggttcctttagtgcagctaactgcatttgtcactgatgaccaaggaggaaatcactaagacatttgagaagcagtggtatgaacgttcttggacaagccacagttctgagccttaaccctgtagtttgcacacaagaacgagctccacctccccttcttcaggaggaatctgtgcggatagattggctggacttttcaatggttctgggttgcaggtgggcactgtatggctgggtatggagcggacagcccccaggagtcagagcctcagcccggctgccctggtggaaggtacaggtgttcagcaccttcagaaaagggcataaagtggtgggggacaattctcagtccaggaaaatgcattgaccattgctggctatttgcttacctagtaagaattggattcatttttgaccagattattcttctatgcttttttgcaataaatcaaatcccacatatctacaagtggtatgaagtcctgcaccccccaggaggcctgtccaggcatgtcttcagaggcagggtgggttacactcatttacctcccctctccccaccaaattatgacacaaacgagtatgtttcctctctagaaccctgtaatgcctcctcccccatccccagagctccttactgtaggtcttaccctggacaaggattttttcaagttggaggcacagaacatgagcaatctgacattcccacagcccctcaaacatgcaaggctactaaggcaggaggagtataaatgatggatattgaccaagacctgcttggacggagaccgccatattatctgttctcttcgttcacaaaacagccttcacttgtctcagaatttgatggacacatactgtgatgagcaggagcttcagatgcactctttacacattttgttgaaataaacctctacatttgtagaagaaaaaaaaaaaaaaaaaaaaaaaaaaaaaa

SEQ ID NO: 6918 - DNA, 1552 bp, Homo Sapiens
  NM_198883
aagccccagcccggcctccgctccggccgccgccaccgcccctgttttgtttccatggcgacaggcggcgcagggcccgctccaaacataacgcgctgtggaaaacatgctgctcgggggacccccccgcagtccccgctcggggacgagccccaaggggccctggagcagtacaggccacgtgcagtttggcaagagcccccagacctggcccaggcgcacaagaccccgctctccagagcctgccgcgccttcaggggttcggggctccacttggacgaggcgccgtgacactccgaggcgcgccgggccgacagcgctgtcccgctacgtgggccacctctggatgggccggcggccgccctcccccgaggcccgcggcccagtcccccgcagttcagctgccagtcgggccagaagaagcctcgcctccccggggatctccccaggccccctgaccgcaacgatcggaggggcggtggcggggggcgggcccaggcaggggagggcagaagcacacaaggaagtgtttccgggacagagggtgggcaagatggcggcgcccatggagctgttctgctggtcagggggctgggggctgccgtcagtggacctggacagcctggccgtgctgacctatgccagatttactggtgctccactgaaggtacacaagatcagcaacccctggcagagcccttcaggaactctgcctgcccttcggaccagtcatggagaggtcatctcagttccacacaagatcatcacccaccttcgaaaagaggtacatactttttggatagacaccaagaactacgtggaagtgacccggaagtggtatgcagaggctatgccctttcccctcaacttcttcctgcctggccgcatgcagcggcagtacatggaacggctacagctgctgactggggagcacaggcctgaggacgaggaagagctggagaaggagctgtaccgagaggctcgggagtgtctgaccctgctctctcagcgcctgggctctcaaaagttcttctttggagatgcccctgcctccttggacgccttcgtcttcagctacttggccctgctgctgcaggcaaagctgcccagtgggaagctgcaggtccacctgcgtgggctgcacaacctctgtgcctattgtacccacattctcagtctctacttcccctgggatggagctgaggtaccaccgcaacgccagacaccagcaggcccagagactgaggaggagccataccggcgccggaaccagatcctatctgtgctggcaggactggcagccatggtgggctacgccttgctcagcggcattgtctccatccagcgggcaacgcctgctcgggccccaggcacccggaccctgggcatggctgaggaggatgaagaggaatgatttgtcctcacgctcccaagactggtttttctactctcatgcattccagaggcccccgtgcctcctcgttgttggtacagccggacacggggtgctgccacccagaataaagccactcacactgactgggctcaaaaa

SEQ ID NO: 6919 - DNA, 3862 bp, Homo Sapiens
  NM_198887
gctgagaggcgcgtactgtgcttgctttttgcagtacctgctgcggccgctttcggcatggaggaaatttatgcgaagtttgtgtcccagaaaatcagcaaaacccgctggcgaccgctgcctccgggaagtttacagaccgcggagacgttcgctacaggatcttgggacaatgaggaaaattatatttcactgtggtctattggagattttggaaacttggactctgatggagggtttgaaggagaccatcagttattgtgtgatatcagacaccatggtgatgtaatggatttacagttttttgaccaggaaagaattgtcgctgcttcatcaacaggatgtgtaacagttttccttcaccatccaaataaccagactctgtcagtcaaccagcagtggactacagctcactaccacacaggccctggcagtccttcctatagcagtgcaccatgtacaggtgttgtgtgcaacaacccagaaatcgttacagttggagaggatggtcgaataaatctcttcagagctgatcacaaggaagctgtaagaaccatagacaatgcagatagtagtacactccatgctgtaacctttcttcgaactcctgagattcttactgtaaattcaattggacagttgaaaatatgggatttcagacaacaaggaaatgagccttctcagatattgtcactgactggtgaccgagtgccactccactgtgttgatagacatcccaaccaacagcatgttgtagctactggtggccaagatggaatgttgagtatttgggatgttagacaaggtactatgcctgtatctctgctgaaggctcatgaagctgaaatgtgggaagttcactttcacccatccaacccagaacatctttttacctgctctgaagatggatccctctggcactgggatgcttccacagatgtacctgaaaagtcgtcactctttcaccaaggaggaagaagcagtacttttttgtctcatagcattagtaaccaagctaatgttcaccagtctgtcattagctcctggctcagcactgatcctgcaaaagaccgaattgaaatcacaagcttacttcccagtaggtctctgtctgtgaacactttggatgttttaggtccttgtcttgtttgtggaaccgatgcagaagcaatttatgttactagacatcttttttcgtagaagtactataattataagatttcagatagaacatgcaattagccttttgaaatccaacttctgtgcaaaattttagtatcagaaaatacgagatttgcaggggaaacatcagtaaactaccattaatgtcaatgcccagttttgacttttgttagcctgacactcccaaacagttgtagaatccgatagatgactgatggcaaaagattgtgaacatgtggaagaaaatcagtgggattctggtgctgatgaataggttgccttcagagtattattgacagacagcttgtggaactaattctttatttttgatgttgtgggaattaacacatcaatggtggttatgggaactaccaatgggttcctacaatttttatcagtagtatgtggcatatacaccttcctagtggcagttgccaatgttaatgattattctttttattgcaagtatttcctatgatccttccacactttatttccttaataataataaactttttcagaaagaattgagtagagcaaaaatgacaaagatgtgtagctgtgttcaatttttttttttttttttttttgaggcagagtcttgctctgctggagtgcggtggtgcaatctcggctcactgcaacctccacctcccaggttcaagcaattctcctgcctcagtctcctgagtagctggaactacaggtgtgcgccaccacgcccagctaatttttgtaattttagtagagacagagtttcaccatgttggccaggatggtctcgatctcttgacctcatgatccacccgcctcgacctcccaaagtgctgtgattacaggtgtgagccactgcacccggcctgaaatttttttaaggtgaaaatgttttgacaagttcctttttcagaataggtttttgagcagaactctttcagcttgttagacccaactttgcttttgtttagcttcacagcatagctgaaagttgccaaactggacattgtgcaataaagtagaattctatattgataagcaaactatttccaaactaaaaatgtgatagataaaagtgtgattaatcaaatgatatgatcagagtaaagaattttgccattttgatccttttactttgttttagccacctatagtgttaccaaccatctttatccttgtctgcagggataataatgaactaatgtagtgttttaagataatttaatgatactatctttccaaactttgttagattttaaatgtattattgacctgagaccttaatgacaaatcactgctattagacaattgaagtgttcatttactttgtaattccaataatcatagttatggaattatggtaaggttttgcttttctgtcctaataaatatatatattttttgagatggagttttgctcttgttgctgaggctggagtgaaatggcatgatctcagctcactgcaacctccgtctcttaggttcaagcaattctcctgcctcagcctcccgagtagctgggattacaggtgctcaccaccacacccagctaatttttgtatttttagtagagatggggtttcactgtgttggccaggctggtcttgaactgacctcatgatccacctgcctcagcctcccaaaatgctgggattacaggcttgagccactgctcccggctgatttttgtattagtagagacgacagggtttcaccatgttggccagggctggtctcgaactcctgaccacaggtaatcagcccgcctcggcctcccaaagtgctgggattacaggcgtgagccacttagtatttgtaaccataagagaaagtatattttaacagcattacatttcatgccaattgacaagttttgccaattttaataagaaactaagctttatgtaatgtaacaccgtaatttatgaatttgttcattgtcactgcctttattcatgaaactgtcaaatagagtgtctttcaagggttgcaggatcttagagatagaaagtaccttggtgatcatctccagcctaaatttcatcatcccttctatggtattcccaacaaattatcatccaacctatacttaaaaacatatggtggccaggcatggtggctcacgcctgtaatgctagcactttgggaggccgaggtgggtgaagcacctgaggtcaagagttcgagatcagcctggccaacatggcgaaaccccgtctccactaaaaatgcaaaaaaaaaattaaccgggcgtggtggcaggcatctataatcccagctacttgggaggctgaggcaggagaattgctcaaacccgggaggcagaggttgcagtgacccaagatcgtgccacttcactccagcctgggcaaaagagcaaaacgccatctcaaaaaatatacatatataaggagataaagtttcccattttccaatacagtttcacatttgaacagccctaattgatacaactttatggcagggttttagtgtgtgagtgggatccaaaacactcaatcctgtaaaagggtacagtcctattgtatgttaacacactgatgatgtgagcctgtgagatgagccaatcaccagttgttatgttcgaatctgctttgtgttgggacgctttaatgtcagggtttcactaaataaatgaattttcatatactgaaaaaaaaaaaaaaaa

SEQ ID NO: 6920 - DNA, 4304 bp, Homo Sapiens
  NM_198893
gcagttgcccacagacccggaagtggatcgtgcggagcaagcatcacaccatggcgtatgagtgttcctctgtgtagactcaacctgcgcctcgccgtcccccattcgcacacccgatgcccgggggtcgctacggacttaaaatctccgcaccgcaccctccacctcagaaacgttcctggatccgaacactgccccctgacgacctagagagatcccggctcccagcccactgagtggcttcagcctcgctggcgcctgccccgggccccgcctacaggggacccagctcttcttgcagccactggaagctgatcacctggagtgaagacctcacacgaagaagtctggaagaagaggaagaggaaagaaaaggagtcagggatggcccttactcaggtacggttgacatttagggatgtggccatagaattctctcaggaggagtggaaatgcctggaccctgctcagaggatcttatacagggacgtgatgttggagaactactggaaccttgtttctctgggactgtgtcattttgatatgaatattatctccatgttggaggaagggaaagagccctggactgtgaagagctgtgtgaaaatagcaagaaaaccaagaacgccggaatgtgtcaaaggcgtggtcacagatatccctcctaaatgtacaatcaaggatttgctaccaaaagagaagagcagtacagaagcagtattccacacagtggtgttggaaagacacgaaagccctgacattgaagacttttccttcaaggaaccccagaaaaatgtgcatgattttgagtgtcaatggagagatgacacaggaaattacaagggagtgcttatggcccagaaagaaggtaaaagagatcaacgcgacagaagagacatagaaaacaagcttatgaacaatcagcttggagtaagctttcattctcatctgcctgaactgcagctatttcaaggtgaggggaaaatgtatgaatgtaatcaagttgagaagtctaccaacaatggttcctcagtgtcaccacttcaacaaattccttctagtgtccaaacccacaggtctaaaaaatatcatgaacttaaccatttttcattactcacacaaagacgaaaagcaaacagttgtggaaaaccttataaatgtaatgaatgtggcaaggcgttcactcagaattcgaaccttacaagtcataggagaattcatagtggagagaagccttacaaatgcagtgagtgcggcaaaacctttactgttcgttcaaatctaactattcatcaggtcatccatactggagaaaaaccttacaaatgtcatgagtgtggcaaggtcttcaggcacaattcataccttgcaactcatcggcgaattcatactggagagaaaccttacaagtgtaatgagtgtggaaaagcctttagaggacattcaaacctaactacccatcagttaattcatactggagaaaaaccgttcaaatgtaatgaatgtggcaagctcttcactcaaaattcacaccttataagtcattggagaattcacactggagagaaaccttacaagtgcaatgagtgcggcaaagcctttagtgttcgttcaagcctagcaatccatcagacaatccacactggagaaaaaccttacaaatgtaatgaatgtggcaaagtctttaggtacaattcatacctcggaaggcatcggagagttcatactggtgagaaaccttacaagtgtaatgaatgtggcaaagccttcagtatgcattcaaacctagctacccatcaggtcatccatactggaacaaaacctttcaaatgcaatgaatgcagcaaggttttcactcaaaattcacaacttgcaaatcatcgaagaattcatactggagagaaaccttacaagtgtaatgagtgtgggaaagccttcagtgttcgttcaagtctgactacccatcaggcaatccattctggagagaaaccttacaaatgtattgaatgtggcaagagcttcactcaaaaatcacaccttagaagtcatcggggaattcattctggagagaaaccttacaagtgtaatgaatgtggtaaagtcttcgctcaaacatcacaacttgcaaggcattggagagttcatactggagaaaaaccttacaagtgtaatgactgtggcagagcctttagtgatcgttcaagcctaacttttcatcaggcaatacatactggagagaaaccttacaaatgtcatgaatgcggcaaggtttttaggcacaattcataccttgcaactcatcggcgaattcatactggagagaaaccttacaagtgtaatgagtgtgggaaagcctttagtatgcattcaaacctaactacccataaggtcatccatactggagagaagccttacaaatgtaatcaatgtggcaaggtcttcactcagaactcacaccttgcaaatcatcaaaggactcacaccggagagaaaccttaccgatgcaatgagtgtgggaaagccttcagtgttcgttcaagcctaaccacccatcaggcaatccatactgggaaaaaaccttacaaatgtaatgaatgtggcaaggtctttactcaaaatgctcacctggcaaatcaccgaagaattcatactggggagaaaccttacaggtgtacagagtgtgggaaagcctttagggtaagatcaagtctaactacccatatggcaatccacactggagaaaagcgttacaaatgtaatgagtgtggcaaggtcttcaggcagagttcaaatcttgcaagtcatcacagaatgcataccggagagaaaccttacaaatgagtgtggtgaggtcattaggtacaattcactcctttcacatcagttaatttcattcttgacagaatccttacaaatgtagtgacagtggccaatccctcatgagttgaagcattaatagatatgagaggccataagcaagagacatcatgtaaacatatgtggcagagggtctatccaggcctcgcaggttactaggcatcaagatttatatctttgatgaaacgaaacaaatgtaatatgcatcctgaggccattacccagtgaccgatggtaagtgaggattcctaggaggaataacagtctctggtttccctgtttgcctttgatattatacactgtagaatactcacaagtccaaatatgctaaaaattatatatttttaactcacatacgaaaaggttgcaggatatttgtaggcagtcagttaccttcaccttatgaaatgtttcactgagttatttgaggttttttggaaagcctactattgcgtttcaatgtgaactttgaaatcttattgtgcatccttacacaccttccatggtgctttcttggaaagatcattgggatggaaggatcattgattgggtgaagatcattgattaggtgaaggattatttctatccaatttgtgaagaaggaggactttgcttttaaaattaagtatcatctgaattagcatttgggagtggcgaaaaacaatgtaaaactatgatgtcactcaccattctgataatgttcagggtgcctttctcctaccaggagagtactgtggcttagaggaaagaaatggtctatcaactgaacatgaaatggagcaggccaagaccttaggacattgggatttttgtgggaggagagtaataggtaattagacactgattgtgtggtagaaatactgcaggggaaaaggtcgccctcttatgcatcaaagagcaatacctgttgtttagcaaagagtgatgaaaaattgatcttgttttgaaattgaagagagaggccaggcgcggtggctcacacctgtaatcccagcactttgggaggctgaggcaggtggatcacctgaggtcgggagttcgagaccagcctgaccaacatggagaaaccccaattgtactaaaaatacaaaattagccgggcgtggtggcaggtgcctgtaatcccagctacttgggaggctgaggcaggagagtgcttgaacccaggaggcggaggttgtggtgagccaagatcatgccactgcactccagcctgggcaacaagaacaaaactccatctaaagaagaaaaagaaaaactgaagagagagtagttgtcagagtgaagagtttaatcaacagaagtagagtaacatattctttagtagaactcacattatctgcttgaagcacattttgctaatgttttattcagaatgtatcatagatataatgttttaactaataaaatagaatggtttttctcta

SEQ ID NO: 6921 - DNA, 11039 bp, Homo Sapiens
  NM_198900
gagccggccgcctccgtccgccttgcttcggtgcggctgtccgctacgctgcctccgccctcgccgcgcgcccccgccagcgggactccagggaacccccggcgccctcgacggggccgaggagtcgggactcggggagccggcgctgagggaggagcctggtcggagccgcggagccgaaagctccggagcgtggaggtggggggccgaggcccctgagggggccccgccgcgatgggcaacctggagagcgccgagggggtcccgggagagcccccctctgtcccgttgttgctgccgcccggcaagatgccgatgcctgagccctgtgagctggaggaaaggttcgccctggtgctgagctccatgaacctgcctccagacaaggcccggctcctgcggcagtatgacaatgagaagaaatgggatctgatctgtgaccaggaacgattccaggtgaagaatcctccccacacttacattcagaaactccagagcttcttggaccccagtgtaactcggaagaagttcaggaggagggtgcaggagtcaaccaaagtactaagggagctggagatctctcttcgcaccaaccacattgggtgggtgcgggaatttctgaatgatgaaaacaaaggcctggatgtactggtggattacctgtcctttgcccagtgttctgtcatgtatagcactctccctgggcgcagggccctgaagaactcccgcctagtgagccagaaggatgacgtccacgtctgtatcctttgtctcagagccatcatgaactatcagtacggattcaacctggtcatgtcccacccccatgctgtcaatgagattgcacttagcctcaataacaagaatccaaggaccaaagcccttgtcttagagcttctggcagctgtgtgtttggtgcgaggaggtcacgaaatcatccttgctgcctttgacaatttcaaagaggtatgcaaggagctgcaccgctttgagaagctgatggagtatttccggaatgaggacagcaatattgacttcatggtggcctgcatgcagttcatcaacatcgtggtgcactcggtggaggacatgaacttccgggtccacctgcagtatgagtttaccaagctggggctagaggagttcctgcagaagtcaaggcacacagagagcgagaagctgcaggtgcagattcaggcatatctggacaacgtgtttgatgtcgggggtttgttggaggatgctgagaccaagaatgtagccctggagaaggtggaggagttggaggagcatgtgtcccatctcacagagaagcttctggacctagagaatgaaaacatgatgcgggtggcagaactagagaagcagctgctacagcgggagaaggaactagagagcatcaaggagacatatgagaacacaagccaccaggtgcacaccctgcggaggctcattaaagagaaggaggaggcctttcagcgtcgatgtcatttggagccaaatgtccggggcctggagtctgtggacagtgaggccctggccagagtaggccctgcagagctgagtgagggcatgccaccctccgacctggaccttctggctccagccccaccccctgaggaggtcctgcctcttcctccaccaccagctccgcccttgccccctccacctcccccattaccagacaagtgtcccccagccccacctctccctggtgctgcaccctctgtggtgttgacagtgggcctgtcagccattcgaattaagaaacctatcaagaccaagttccggctgcctgtcttcaactggacagcactgaaacccaaccagatcagtggcactgtcttcagcgaacttgatgatgagaagatcttggaggacctggatcttgataagtttgaagaattattcaagacaaaagcgcagggccctgcccttgacctcatctgctccaaaaacaagacagcgcaaaaagctgccagcaaggtgactctgttggaagccaatcgtgccaagaacctggccatcaccctacgcaaggctggccgctcggctgaggagatctgcagggccattcatacgtttgacttgcagacactacctgtggacttcgtggagtgcctgatgcgcttcctgcccacagaggctgaggtaaagctgctgcggcaatatgagcgggagcggcagcccctggaggagttggcagctgaggaccgcttcatgctgctcttcagcaaggtggaacggttgacccagcgaatggctggcatggccttcctggggaacttccaggataacctgcagatgctcacaccgcaactcaatgccatcattgcggcgtccgcttccgtcaagtcttcacagaagctgaagcagatgttggagatcatacttgcactggggaactacatgaacagcagcaagcggggagctgtgtatggcttcaagctccagagcctggatctgctgctggataccaagtccactgaccggaagatgacactgcttcatttcatcgccttgacagtgaaggagaaatacccagacctggctaacttctggcatgagctgcactttgttgagaaggctgcagcagtgtccctggagaacgtgctgctggacgtgaaggagctgggccggggcatggagctgattcggcgtgagtgcagcatccatgacaacagcgtcctccggaacttcctcagtaccaatgaaggcaaactagacaagctccagcgggacgccaagacggctgaggaggcctacaatgcagttgtgcgctactttggcgagagtcccaagactacacctccttctgtattcttcccagtatttgtccgattcattcgttcttacaaggaagcagaacaagagaatgaagcccgcaagaagcaggaggaggtaatgcgggagaagcagctggctcaggaagccaagaaactggatgccaagaccccatcccagcggaacaagtggcaacagcaggagttaatagcagagttgaggcggcgccaggccaaggaacaccggcctgtttatgaggggaaggatggtaccatcgaggacatcatcacaggcctccactgccagcctatggttgttcgccaccaagccaggagtgctgcaccgcccagtggtccccctcgggctccaggcccccactgagaccctctcggaggcagaagcacttcacccctcagagtcctacaagtccaaccagtggacctggaattggccaagggctcaggagagggctgtgttgctctctcaaccatgtccgccccagctcttgaggctggatctttctacttgtgccactatgggcactaggtctgtaggtccctggtgcttccagtactgcactttgcccccaaggtctttgacttcatttcctgaagggtcaccaagggtcagctcagggctaggaaaaaccatttccagccttagcctaaacagggcacatagatctctcccactagagcccagagggatgagaggagagagcaactgttctttctttttttttcccttcctttttgcaggcccatggtcagctctggtctagatgtatctaggcttagggagccctgggaccctgccagtctcagttcatctcttaccaggagcaaggccctctgaagcatgggccgtgccagctgtgccctagtgataagggtaagaggagagatgtcaggctcactgcccttatttctctgcccatttcattctaggctcacactgtccttgtcaaggtgggcagaagagcagaggtcttctctgcaccaaccactctctgcagatggctggagaaagggtgtgccaactcttcaccttctttcctcagctacggtttttttttttttttttttttttttggcaggggacaaggagcatggtggtcttggctatttgcttaccttcccgtttctcctctgcccctggaagggaatgtgggggcccacttttttgtacatgtaccacctccctttcctcttactgtacataaacctcagactctccccctctcaacaaaggcttgatgcaccaggcctgactttgtctcctctttctgagcttagggggctagggtggccatttagtctgacctgggctatggggatagaaaagaaatctttggggcactgcatctgttttggaggagatgagatcagaactctggggaaaggagaaccggctaggtgggctctagccacacaaagggaagcaggcctgccatgagacactagtgccctctgctgggcatgtgtccagtccccagcctgccccagtagcacatggaaaagagtcactggccatgttataaatattgttatttaaaaaacaaaaaacaaaacacacgtacattaggtcctgggtggaggaagaagtggtggagcctcagggccagggcaggcaggagcaggcactgatgctagagggtgatgaccctgccctctgccacccaggctgcgtccaacagcctgtgactcttccctggagaccccttctctcacacttttatctactggcatcacccaccccacatggcatataccacccatctctggtctggggctgagggcaaggactgcactagtccagggagtaggggacccttgaacaccaagagcaaccttgagaggtgccaacaatggtgtgctgggggtggggttactttagaaaaagtggacacagaccagactaaggaagaagtctgaggcagacggtgagggtggcccaggagccatggcctcacacagacccgaggcagagaacagctcattgggtcactggtgatcatccagctgctgtaggagtgtccgccgccgcctctccagctcaccctcactcagctcactttctgacgtgtcccagcctgtctgttggagcaaaggcacagttcacccttagcctgcactaagggccgtggaagcttgaccagcgtgctgactggcctagggcccctgcccctcaccttctccttcttgattccaaagcctggggaacggttagggagctctgcctgttggagctccctgtccttgtcctgttcttgttctttctcatcgctctccttgccagctttctcctcagggtctgtctcactctcaggactattctgtaagagtccagagcccacctcctcagttcctgtggatagcctgggaggcaggtagaacagaactcacaaaatagcaggggcttaggtagaagttccttcactcaccgacttgtgtcttctcttcttagttttcttttttggtttcttggctttccgaaggccatgatctagagatagaaaaatccctactaagtcccaacaggagaaagacaggctctttttctttgttctagcccctctgttcattcttcacaggcaggaacctcatgctctgaggaagtctaagtccagttttccttctccagcttcttgcttgggcaggtagaggaagttctttctacttccacaggtgcagccctcccaatccagtctaccctcaaaggagctggggcttgtggagggcatcctctcagtctgggacaacagttctccagcttctacgctcacagcaactgcttacctgctccaagaagatgggaggaaggggagccccgtcctccaagggcagcacccccactttcaactgaatcaagtgaggaagagggctcagagcctgactctgaggggttccgcctcctccgcttggggggccggagagatggtgggggcagctcctcttcttctgactcagagccctgggcagatcagcagatacatgtcagtgcagaggttctctgccctccagaagccctcgtctgggaattcgagagaggaggaggacccagggccaaaggaatcctcaaacttccctccaagggagatattgtaaggggaaaacaaagtgtttatttccccaaaacaacccagcttcaccccatgtcccttctacacgcttactcactgagggtgagtgggaacgcttgtgatggtgcttcttgcctttcctgccatgctttcggcctttggtgtggaggtgctggcattcagtctgctagaggcagaggaagaagggtgaggacagcaccagacttagccccaggaaggatcctacttcctaaaatctggctttgcctccctttctcagactagagccttctgcctatcccagggatcctcaggcctccccttccttagctggccaggagtgccctaagggtaagagggaggccactgaggtctctgttgaactggtctaatgagttcaagggcctgaggcagatccagaggacaagcctgcctcacctccagcacctgtaggaactcccggaagagccggatccgctccgactccagggtgatctgctcaaaggctgagtcacacacaaaacgctcacggaccttgaacgaggagagcactgctgatcagactaggccccactcagcctggcctggacaccgccatgagcacagggcagggctggggcagagaaaggaagggaactggagctggcccagggctgtgacgtgactggggtgggccctcagtggtgaagcaccgctgccctcaggcttgaggggtgcttggggccaggctacgctcctgacctcttcccaggcagtgcctagctccagagcaggcacagcctgcctcagcatgcttcgaaaggcagcttccctgcgccgcatcctgcgtgcctcctccttctcccgctccctctcccgtgcctctgctttctccagcagctgaggaaagaagggacacggaacagggtcacccaggagggtggatgccaggtcccactcaggcataccttaggaggtggaaagttagggtctgggcttctaccaccatcccctgaattgggaatatagtcagtgggacagtgagtgagaaggaatggagcaagacacagatgaattagagaacttcccacgccccgcccagcccctcacactattgaaggtcagcttgatgttgcctgcgtccagtgcggcagccctcttgtcaaagcttatgacgtgggcgaagtcctcaaaggccgtgttcacctccacgcagaagccccggtcctgtgggtacagcagtgcatgaagcaggggcaccacgtgcctgaggccaaagctggcaggcagagtggtcacattacagatggtcaagaaggcccttgcctctggaagagatccacaggactgtggtctgcattagaaaccaagttatccaagtcctcatcacttgacaattaagcccccatgcctacccttggtttggatgtcacacagagctgaaggggttgggagatgtctcccaactgctgattaatgctgagtttctcaaaattaacttttgttcctttggcttaaagctctggccccagctgggccctcctgctgctcagcagtgcttccatgcattctcaatcaacatttgctggcccctaccctttgggtctatttattgagtgcttactatgtaccaggtaccatgatgagtgtttcacacattatctcatttaatcctcttggttctacatttaagaataggtcctagtatcctaattttacacagaaggagaaaccaaggttcagagaaactagagcacttgcccaaggtctcacagctgatatacggctgggcaagaaccctaccctgggggggctctctatccccaaagtgtctgctttcaagcaccacacccacccagatgacttagtccatgggagaaacggaggccaccaggtgtgcagctccccaccaatactaaaaacatgtccacaggccaggctctatgcttctcatttaggcctcacaacattccagtgaagcagaggcttagaaaagtgatctcagttggcccaagatgacatgagtggtaaatgaagccactggagttcaaagtctggctctcacgtcagttaagcacaggccagattccctttctctccctccacatagctctcacctcctctggcctttttgctgatggcagaggtgtgctcctctttcttctttccaagggtacttcctcaaccctgctacagtccttatcaacacagcattcattctcagggaattgaaagctccaagtcacccttgttactggctccttccatcaagcagacacctcacctaacctggaacatcctttccaccatgctctccccttcatcaagctaactacctctgctcttttccattgtttcaaaacctcttgaaatgcagcagaaaggaaaaggaataaacatttattgagaacctattagacactttacagatgttatttaattctcacaaccttacctatgaattatccctgatttacaggtgagcaaacaggctcagagacacggaacttacggaggtctcagagccaataagcaaccaggagtaatctgactctaaaacatgtgctgcccccatgccacctccatgactctactctcccaaaggttgcttgtgtctactagccaaatccaaggccgccttctttgtcctcactcatctggtcctcagtgcctctaccacttacttcttcaacactcccctctccaggtcacaccctctctgaccttttattctcttgcatatgcatgttcctgagaacagcacttagtcctctttcactacccaatctgtactccctcgcaatctcatccttcatctctcctgattttcaaacatcctagactggatatttcagacacttaaaattcaacagatctcaagagaatatatttctcatgagcatcctccatggatctccctgacccggatctgtctgcctgttctaagtccagggctctttgcattatcctatgggatgaaaggcaccatcatggtctgcctggctgtggaaagcaagagggactcctgggctcatctgccctccataggcaggaacccaaatggggaaagaggaagggaactgtctaaaaaagttgctttctcaggttgtgtggagagacaggactcagtgaggataggcccctacaggcctatcaaccagccactctgtggctaaaagttaattgtccaataaaatttagctatcccaggataaggcatttctactttatacgattattctgttttaaaatatatttgctttgagagtaattccccaaatagaattcctattttctacagccttgctcttcttgttttatccttatcaatagtgccatcatccactgccctgacacctctgattccttcctttccctccatttcacaaaatctatcaattctacttagtgactctatcccactggtgttgaattctcccttttttttttaaacagcagaaacagtttattaaaatagaaatcttatgtagaacctttatgcataaaaaagattcaagctgcttcacttgaaaacaggaagcagcaccaaatccccccatactcaactccaacccttgcttgtctcaaggcacctacatagaaacccagagtgtctcagaagaacagctggagcgctacagcctgctctcttctgctgtccccactgcccccggctaggatcacctcctacaagattcctgcacagcctactgacttttctccctgctcaccctcttccatccctctaacccagctcctagcatctagtgcttcttggacttttgtaccaagtagccccaacagtaggagagaggtctggggataagtgaaatgaatatgactatttgaattaccactatcagttttagtatcttgaggcttcaagaactgctctacctagcaccaccaccttccctaaggacataagtacgtactctagactgaaaggttctactatacaccatctaatctgatcattccccggttcctcattacttacgagagaaaaatccaaatttcttattttagcattcaaggcactttacatgcagggctctacttccaagctggggcatgtggttccagagaaagagaggatacctcaggacagtatgatacatcttacctaatggtaagtaatttaaaatattaaatttatattaaataggtaatatggtgttaaaatgcaacacctacgtgaatttgtaaggcaaaacagtacttcaaagaaatgtatatgcagtgagacatttctagctttatttccagatccctttcaacccaggtaccatttaatctctgtaattaggtgtactctggtggaacactcaccattttttagatgaggaaacagggtcagaaaggtcaagtgacctatccaaggtcacacaactagcaagcagttaagctagacttttactgtaggcagtctgcctccagtcccgctcctaaccactgtactgtattatctcctcaaatgcattagaatcttcacttccataaagaaatatgctctttgtttttttcttttggaacacaaggtttagtccatcactcactcacttttccacttttgataagatgtaaatattgagaactatttctcttctccagtagaagaagagcaacaggccatgtgtgatggtaaatggcagctgacacttgcgacagtatcaagaaggcactaaggaatggtgagaaggatgacttgccctttctaaagtggcatctcagcttgagtctgcagaatgccttgcaaatccagctcagtactgctagataatccatattgacaagagaagctaaagattcagattttctatgtgaagtttcctggttttaaaatgttagcaacaaattccaaatttttacagaacactgtacaggccagaaagaacaatctgtgtgctaccagtttacaattagctatgcttcttcctcctcagacctggcatgccctttccacccccttgcctttgctcttagtaccccgtgtacactccaacctcttccacctacaaatttctaaatgcacagttcaaatgttagttcttcagattcctgtctctgtaataacacttgcccctttgtataacagttctcatgtatatcttcctattagaccatgagctcctgtggtagaaattgtgtattcattactgtatccctagtgtgcagtaaaggatcacagtag

SEQ ID NO: 6922 - DNA, 3780 bp, Homo Sapiens
  NM_198925
gcttgcgggtgagctctgcccaagccgaggctgcggggccggcgccggcgggaggactgcggtgccccgcggaggggctgagtttgccagggcccacttgaccctgtttcccacctcccgccccccaggtccggaggcgggggcccccggggcgactcgggggcggaccgcggggcggagctgccgcccgtgagtccggccgagccacctgagcccgagccgcgggacaccgtcgctcctgctctccgaatgctgcgcaccgcgatgggcctgaggagctggctcgccgccccatggggcgcgctgccgcctcggccaccgctgctgctgctcctgctgctgctgctcctgctgcagccgccgcctccgacctgggcgctcagcccccggatcagcctgcctctgggctctgaagagcggccattcctcagattcgaagctgaacacatctccaactacacagcccttctgctgagcagggatggcaggaccctgtacgtgggtgctcgagaggccctctttgcactcagtagcaacctcagcttcctgccaggcggggagtaccaggagctgctttggggtgcagacgcagagaagaaacagcagtgcagcttcaagggcaaggacccacagcgcgactgtcaaaactacatcaagatcctcctgccgctcagcggcagtcacctgttcacctgtggcacagcagccttcagccccatgtgtacctacatcaacatggagaacttcaccctggcaagggacgagaaggggaatgtcctcctggaagatggcaagggccgttgtcccttcgacccgaatttcaagtccactgccctggtggttgatggcgagctctacactggaacagtcagcagcttccaagggaatgacccggccatctcgcggagccaaagccttcgccccaccaagaccgagagctccctcaactggctgcaagacccagcttttgtggcctcagcctacattcctgagagcctgggcagcttgcaaggcgatgatgacaagatctactttttcttcagcgagactggccaggaatttgagttctttgagaacaccattgtgtcccgcattgcccgcatctgcaagggcgatgagggtggagagcgggtgctacagcagcgctggacctccttcctcaaggcccagctgctgtgctcacggcccgacgatggcttccccttcaacgtgctgcaggatgtcttcacgctgagccccagcccccaggactggcgtgacacccttttctatggggtcttcacttcccagtggcacaggggaactacagaaggctctgccgtctgtgtcttcacaatgaaggatgtgcagagagtcttcagcggcctctacaaggaggtgaaccgtgagacacagcagtggtacaccgtgacccacccggtgcccacaccccggcctggagcgtgcatcaccaacagtgcccgggaaaggaagatcaactcatccctgcagctcccagaccgcgtgctgaacttcctcaaggaccacttcctgatggacgggcaggtccgaagccgcatgctgctgctgcagccccaggctcgctaccagcgcgtggctgtacaccgcgtccctggcctgcaccacacctacgatgtcctcttcctgggcactggtgacggccggctccacaaggcagtgagcgtgggcccccgggtgcacatcattgaggagctgcagatcttctcatcgggacagcccgtgcagaatctgctcctggacacccacagggggctgctgtatgcggcctcacactcgggcgtagtccaggtgcccatggccaactgcagcctgtacaggagctgtggggactgcctcctcgcccgggacccctactgtgcttggagcggctccagctgcaagcacgtcagcctctaccagcctcagctggccaccaggccgtggatccaggacatcgagggagccagcgccaaggacctttgcagcgcgtcttcggttgtgtccccgtcttttgtaccaacaggggagaagccatgtgagcaagtccagttccagcccaacacagtgaacactttggcctgcccgctcctctccaacctggcgacccgactctggctacgcaacggggcccccgtcaatgcctcggcctcctgccacgtgctacccactggggacctgctgctggtgggcacccaacagctgggggagttccagtgctggtcactagaggagggcttccagcagctggtagccagctactgcccagaggtggtggaggacggggtggcagaccaaacagatgagggtggcagtgtacccgtcattatcagcacatcgcgtgtgagtgcaccagctggtggcaaggccagctggggtgcagacaggtcctactggaaggagttcctggtgatgtgcacgctctttgtgctggccgtgctgctcccagttttattcttgctctaccggcaccggaacagcatgaaagtcttcctgaagcagggggaatgtgccagcgtgcaccccaagacctgccctgtggtgctgccccctgagacccgcccactcaacggcctagggccccctagcaccccgctcgatcaccgagggtaccagtccctgtcagacagccccccggggtcccgagtcttcactgagtcagagaagaggccactcagcatccaagacagcttcgtggaggtatccccagtgtgcccccggccccgggtccgccttggctcggagatccgtgactctgtggtgtgagagctgacttccagaggacgctgccctggcttcaggggctgtgaatgctcggagagggtcaactggacctcccctccgctctgctcttcgtggaacacgaccgtggtgcccggcccttgggagccttggggccagctggcctgctgctctccagtcaagtagcgaagctcctaccacccagacacccaaacagccgtggccccagaggtcctggccaaatatgggggcctgcctaggttggtggaacagtgctccttatgtaaactgagccctttgtttaaaaaacaattccaaatgtgaaactagaatgagagggaagagatagcatggcatgcagcacacacggctgctccagttcatggcctcccaggggtgctggggatgcatccaaagtggttgtctgagacagagttggaaaccctcaccaactggcctcttcaccttccacattatcccgctgccaccggctgccctgtctcactgcagattcaggaccagcttgggctgcgtgcgttctgccttgccagtcagccgaggatgtagttgttgctgccgtcgtcccaccacctcagggaccagagggctaggttggcactgcggccctcaccaggtcctgggctcggacccaactcctggacctttccagcctgtatcaggctgtggccacacgagaggacagcgcgagctcaggagagatttcgtgacaatgtacgcctttccctcagaattcagggaagagactgtcgcctgccttcctccgttgttgcgtgagaacccgtgtgccccttcccaccatatccaccctcgctccatctttgaactcaaacacgaggaactaactgcaccctggtcctctccccagtccccagttcaccctccatccctcaccttcctccactctaagggatatcaacactgcccagcacaggggccctgaatttatgtggtttttatacattttttaataagatgcactttatgtcattttttaataaagtctgaagaattactgtttaa

SEQ ID NO: 6923 - DNA, 1931 bp, Homo Sapiens
  NM_198930
agagtatgaggaagccagcactagtcaagtgactctaagaagggccattttcccttgttgtctttgaaaatacttcattttcttagcatttcaggagattataacatcctgtatttcagtttctgagagctttactgactgatttccctattcaaaacaatcctcatttcctacatttctgaagatctcaagatctggactactgttgaagaaattcccagtaaggctcacttatatctttagagatggcaaataactacaagaaaattgttctactgaaaggattagaggtcatcaatgattatcattttagaattgttaagtccttactgagtaacgatttaaaacttaatccaaaaatgaaagaagagtatgacaaaattcagattgctgacttgatggaggaaaagttcccaggtgatgccggtttgggcaaactaatagaattcttcaaagaaataccaacactgggagaccttgctgaaactcttaaaagagaaaagttaaaagtcaaaggaataatcccatctaaaaagacgaaacagaaagaagtgtatcctgctacacctgcatgcaccccaagcaaccgtctcacagctaaaggagcagaggagactcttggacctcagaaaagaaaaaaaccatctgaagaagagactggaaccaaaaggagtaagatgtccaaagagcagactcggccttcctgctctgcaggagccagcacgtccacagccatgggccgttccccacctccccagacctcatcatcagctccacccaacacttcctcaactgagagcctaaaaccattggccaaccgtcacgcaactgccagtaaaaatattttccgagaagacccaataatcgcgatggtactaaatgcaacaaaagtatttaaatatgaatcctcagaaaatgagcaaagaagaatgtttcatgctacagtggctacgcagacacagttctttcatgtgaaggttttaaacatcaacttgaagaggaaattcattaaaaagagaatcatcattatatcaaattattccaaacgtaatagtctcctagaggtgaatgaagcctcttctgtatctgaagctggtcctgaccaaacgtttgaggttccaaaggacatcatcagaagagcaaagaaaattccgaagatcaatattcttcacaaacaaacttcaggatatattgtatatggattatttatgctacatacgaaaattgtaaataggaagacgacaatctatgaaattcaggataaaacaggaagtatggctgtagtaggaaaaggagaatgccacaatatcccctgtgaaaaaggagataagcttcgactcttctgctttcgactgagaaagagggaaaatatgtcaaaactgatgtcagaaatgcatagtttcatccagatacagaaaaatacaaaccagagaagccatgactccaggagcatggcactaccccaggaacagagtcagcatccaaaaccttcagaggccagcacaaccctacctgaaagccatctcaagactcctcagatgccaccaacaaccccatccagcagttccttcaccaaggtcaccaaggacaaggatatcaaataactactgttcaatctttactcaagtgtggaaattttgcctgaagtcctccacctaaaaacctgatgccattggtaatgatgtttatgaagataagatcaaagcacagaaaataatatatgtatatatatctggttgaaatactatatatatatatatatatatatatatatatatatatatatatatataccagctattaattctaggaaatggagtattaagggtgcattttatttcattagttttacttttatgcattttcttcatatcatattttgcattcagaattttcataatttgaaaaaaaataaacttttttttcttaaa

SEQ ID NO: 6924 - DNA, 4566 bp, Homo Sapiens
  NM_198935
agcgcagccggagtatccacctcgatgaccacgggctgagccccgcgccgccaccatgtccgtggccttcgcgtctgcccggccaagaggcaaaggggaggttacgcagcaaaccatccagaagatgctggacgagaaccaccacctgatccagtgcatcctggagtaccagagcaagggcaagacggccgagtgcacgcagtaccagcagatcctgcaccggaacctggtatacctggccacgatcgcagactccaaccagaacatgcagtccctgcttcctgccccgcccacgcagaacatgaacctgggccctggagccctgactcagagcggctccagccagggcctgcactctcagggcagcctgagtgacgccatcagcacgggcctgccaccctcctccctcctgcagggccagattggcaacgggccgagccacgtgtccatgcagcagacggcgcctaacacgctgcccaccacctccatgagcatctctgggcccggctacagccacgcgggacccgcctcgcagggcgtccccatgcaggggcaaggcaccatcggcaactacgtgtctcggaccaacatcaacatgcagtccaacccagtctccatgatgcagcagcaggcggccacgtcgcactacagctcggcgcagggcggcagccagcactaccagggccagtcgtccatcgccatgatggggcagggcagccaggggagcagcatgatggggcagcggcccatggcgccctaccggccctcccagcaaggctcttcccagcagtacctgggccaggaggagtactatggcgagcagtacagccacagccagggcgccgcggagcccatgggccagcagtactaccccgacggccatggcgattacgcctaccagcagtcatcctacacggagcagagctacgaccggtccttcgaggagtccacgcagcactactatgaggggggaaactcccagtacagccagcagcaggccgggtaccagcagggtgccgcgcagcagcagacgtactcccagcagcagtaccccagccagcagagctaccccgggcagcagcagggctacgggtctgcccagggagccccgtcacagtaccccggctaccagcaaggccaaggccagcagtacggaagctaccgagcaccgcagacagcgccgtctgcccagcagcagcggccctacggctatgaacagggccagtatggaaattaccagcagtaagggacacacattctggctggagcccttgtggtagcgtgttcatccaggggccggatgggctggcggcagctctggtgaattgtgacatgttggttacctgttcgcccagtgccacgtctgcatgtgaagcgtgctcatttcatgctgggtatgacgccgagcgcacaccactggcgtgagacagcgcttggtggtgtgatacttttggtgctgtgtatagtattgtatgtcggtacacggagaggtatcctttttttgtcccccgcccccttctcaatgtttctagctagctttgggggtcattttgtcatcagagcattctgtgcccagggacaggacagatctcgaggacaccacagtccacctgttcccgtcaacagacgttaggtctcattttcctcctcatgcagtgttgtagtgtgggttgtcaacttttctttaactggctacgccacagctggacacacatgcagcccctggagggcagcctcttcctgtgcctcgatggggtgggtgggagggcatcttctgtgcgttgggtcagtttctgttacgtaacgaaaaggataaacatctcccacgggagaggccacagatggccacttccagagcttgcccattgcctgtctctcgccaattccgtttatccaaaaaggtacatgtttttgtattaaaaagtaaacagggatcagtgactgtattccaaataaatatgaatccctaagggccgtggacaaattgcctaacccagggccagcggtattgctgaaggaaaggggcagctctctgggaagtgggccctcagagattactctggctttgacccttgtttagctgatggtcatttctgggattggaatatttaataagcccaattctaagttgataggtaattttaaatattcaaaccaaatcttcccaacagttggcaagttgtttattttatattatttcttccaggacctacttgctcagatctccaagcaagcatttcttttcttttagggatgtctgaaagtcacatccagttacattactgtgttctttctaatgaaaagtaaaggttttatatagagaaacttgagtaatttttacatttctaagacattaaatcccatttaaattctgtgtgaacattaaagacagcacacttgcaaaagtatggtcaaaggaaaaaaatcccacatttcaattaacaagtagcatggacatttgatcaacctttagttggaataataatattcatatttgctatgaatccttttaaaaaaatctttggataaatgctgacagatttccaagaactaccaagaaaatacaagagatatccaatgcttgatatatgaggcctagtaataacgatatttctctttaattgatgttttgttttaaaagttaaaagtaattcttggcgtggtggttcacgcctgtaatcccagcactttgggaggccgaagcgggcggatcacctgaggtcgggagttcgagaccagcctgaccaacatggagaaaccccgtccctactaaaaatacaaaattagccaggtatggtggtgcatacctgtaatcccagctactcgggaacctgaggcaggagaatggcttgaacccaggagacagaggttgtggtggggcaagatcgcaccattgcacccgagcctaggcaacaagagtgaaattccgtctcaaaaaaataaataaataaataaataaataagttaaaattaattctttatccagagtcgggtgctttagaatttataagtcacttatgtgttttgcttgaattaattctgacagcccctatgaggaaatctggaggcaggtaacagttcccattttagagatgaagaactgaggcacagattaaaggacttgcctgtgttgaataccagtcctgttctaggacattctcccctctcctaggagacggatgtcacgcacaaatggggagagaagtgtttattttgtaggcactaagggtttctaaaacccttaacactggtaagggctcaaaaataaacgtatgtgttcatattcgatcaccgaaatgagagttcttaattgctaattgacaaacgcgttagcaatttcagttagggagtcatctcccttgattgtgttcttttcctgtcaattttcatagacctaatttgcaaactcaatcggggactaaaatttcccactgaaaatgttaaacattttagataactgtgaagatagtttatttttattccttgccaatctgggaatatgccttttttgtgtgtttgtgtgtttttttaagtgctgtattaataatactttctgaaagaaaaggacacttaccccaaaacttcaatctgaaatgtcttacattaagaatatcttgaatgttgtgtatatattttaaaaagcactttgcaaaatagtttgtacatttatttcctaatttatacatgatttttggtgttaatatatttaatgattaataacagaatgtttatttaatgtgctgtccatttttatgtaatattatggggaaagtgatgccagcagttccttttcattattctatcttctgtcatatgaatgttgagcaaagcttaggccaacatgaattgtttgtgaagtgtggttgatggtgctttgtttttttctgactacttctatggaaggccagtgaagaagcaaaggaagacatgaaaattgacgctcattcttcttcctattgttccctgacatccagcaaattgtgaatttgaaaaatgatggccagttttcagaagtgctgacaaattcatattggtatgcaaaagctcatcacccattaaggtttgttgttgaatcaacagtactcagcatattaaaacagtacatcagaactcatgccaacagtctttatgatgggattaaggtggacaagatctcctaagatctgtgaatgggattaaggtggacaagatctcctaagatctgaaaagaaaccttaatacgctcatatggttggagtgttaagtgaacctctgattttgtcagggtttttctacgtgtaggcgtgaatagggggcaccccttcaaaactgtacaaagaagacgactgttttccatttccatttaaacatttttagccacttcatttctatttattgaacaggtcaaatttgtcttgttatttgtgagtacagtacatttaaaaaacatccttatcggttatttttttttcagtcggagtttgacgtataaattgtttatgcttttggtgtaatctcttaataaactggttcttcaaaaatcatcctataaagtgagttttcatgaagaaaaaaaaaaaaaaaaaa

SEQ ID NO: 6925 - DNA, 1642 bp, Homo Sapiens
  NM_198938
ggctgtccgcggagacgcctatgcggtggaggctccgggcttcagctagggcgggggagcccagcagaaggaccgagcagcctggcaccccactttgccatcctctccctggaaatctcggggtcggcgggccggccgcttcgcgtgggcgaaatcagagacacgtggtttccaaggccccttcggctctccctgtccagccgcctgcagctgaccctgtaccagtacaagacgtgtcccttctgcagcaaggtccgagccttcctcgacttccatgccctgccctaccaggtggtggaggtgaaccctgtgcgcagggctgagatcaagttctcctcctacagaaaggtgcccatcctggtggcccaggaaggagaaagctcgggacggcagatatgaaatgcctggcacagtgcttggggtctagtatgtagcttccagaacccaccctgcccctctacctgggaggccaaatggcaacaactaaatgactcctctgtcatcatcagcgccctcaagacctacctggtgtcggggcagcccctggaagagatcatcacctactacccagccatgaaggctgtgaacgagcagggcaaggaggtgaccgagttcggcaataagtactggctcatgctcaacgagaaggaggcccagcaagtgtatggtgggaaggaggccaggacggaggagatgaagtggcggcagtgggcggacgactggctggtgcacctgatctcccccaatgtgtaccgcacgcccaccgaggctctggcgtcctttgactacattgtccgcgagggcaagttcggagccgtggagggtgccgtggccaagtacatgggtgcagcggccatgtacctcatcagcaagcgactcaagagcaggcaccgcctccaggacaacgtgcgcgaggacctctatgaggctgctgacaagtgggtggctgctgtgggcaaggaccggcccttcatggggggccagaagccgaatctcgctgatttggcggtgtatggcgtgctgcgtgtgatggaggggctggatgcattcgatgacctgatgcagcacacgcacatccagccctggtacctgcgggtggagagggccatcaccgaggcctccccagcgcactgaatgtccccgcgcagagcagagggaaggcagcggaagacgccagctgccagggcctggggccactgggccagcgcctggcgatactggttgggggcaggatcattctgccccttgtccacgcacccccaccagccctctcgcttctaacacagggcacctgctggggctcagggatgttagggacgagttccagccctgccactgccctggggcgacccctccctgtccctgcctccctgctctgccgcccctcttcctggaccctcagtggctgtcccatggctacatcctgtgggtgggggccctcgacaggacagcaggacggtttgttttcagtggaatcccatccctgggttcccctggttcccactcttcccaagcctcccgggactgggacatgtttgcaataaaggaaaggtttgtggcgcctgtcatggcaggcatctcatggaaaaaaaaaaaaaaaaaaaaaaaaaaaaaaaaaaaaaaaaaaaaaaaaaaaaaaaaa

SEQ ID NO: 6926 - DNA, 743 bp, Homo Sapiens
  NM_198948
ggtcagaggccacgcccccggaagcggcggtgcaggtttcttgccttgatgtactggagcaatcagatcacacggcggcttggagaaacccagggaccatgggcgcctccaggctctataccctggtgctggtcctgcagcctcagcgagttctcctgggcatgaaaaagcgaggcttcggggccggccggtggaatggctttgggggcaaagtgcaagaaggagagaccatcgaggatggggctaggagggagctgcaggaggagagcggtctgacagtggacgccctgcacaaggtgggccagatcgtgtttgagttcgtgggcgagcctgagctcatggacgtgcatgtcttctgcacagacagcatccaggggacccccgtggagagcgacgaaatgcgcccatgctggttccagctggatcagatccccttcaaggacatgtggcccgacgacagctactggtttccactcctgcttcagaagaagaaattccacgggtacttcaagttccagggtcaggacaccatcctggactacacactccgcgaggtggacacggtctagcgggagcccagggcagcccctgggcaggagacgtggctgctgaacagccgcaaaccatcttcacctgggggcattgagtggcgcagagccgggtttcatctggaattaactggatggaagggaaaataaagctatctagcggtgaaaaaaaaaaaaaaaaaaaaaaaaaaaaaa

SEQ ID NO: 6927 - DNA, 1879 bp, Homo Sapiens
  NM_198951
ataagttagcgccgctctccgcctcggcagtgccagccgccagtggtcgcacttggagggtctcgccgccagtggaaggagccaccgcccccgcccgaccatggccgaggagctggtcttagagaggtgtgatctggagctggagaccaatggccgagaccaccacacggccgacctgtgccgggagaagctggtggtgcgacggggccagcccttctggctgaccctgcactttgagggccgcaactacgaggccagtgtagacagtctcaccttcagtgtcgtgaccggcccagcccctagccaggaggccgggaccaaggcccgttttccactaagagatgctgtggaggagggtgactggacagccaccgtggtggaccagcaagactgcaccctctcgctgcagctcaccaccccggccaacgcccccatcggcctgtatcgcctcagcctggaggcctccactggctaccagggatccagctttgtgctgggccacttcattttgctcttcaacgcctggtgcccagcggatgctgtgtacctggactcggaagaggagcggcaggagtatgtcctcacccagcagggctttatctaccagggctcggccaagttcatcaagaacataccttggaattttgggcagtttgaagatgggatcctagacatctgcctgatccttctagatgtcaaccccaagttcctgaagaacgccggccgtgactgctcccgccgcagcagccccgtctacgtgggccgggtggtgagtggcatggtcaactgcaacgatgaccagggtgtgctgctgggacgctgggacaacaactacggggacggcgtcagccccatgtcctggatcggcagcgtggacatcctgcggcgctggaagaaccacggctgccagcgcgtcaagtatggccagtgctgggtcttcgccgccgtggcctgcacagtgctgaggtgcctgggcatccctacccgcgtcgtgaccaactacaactcggcccatgaccagaacagcaaccttctcatcgagtacttccgcaatgagtttggggagatccagggtgacaagagcgagatgatctggaacttccactgctgggtggagtcgtggatgaccaggccggacctgcagccggggtacgagggctggcaggccctggacccaacgccccaggagaagagcgaagggacgtactgctgtggcccagttccagttcgtgccatcaaggagggcgacctgagcaccaagtacgatgcgccctttgtctttgcggaggtcaatgccgacgtggtagactggatccagcaggacgatgggtctgtgcacaaatccatcaaccgttccctgatcgttgggctgaagatcagcactaagagcgtgggccgagacgagcgggaggatatcacccacacctacaaatacccagaggggtcctcagaggagagggaggccttcacaagggcgaaccacctgaacaaactggccgagaaggaggagacagggatggccatgcggatccgtgtgggccagagcatgaacatgggcagtgactttgacgtctttgcccacatcaccaacaacaccgctgaggagtacgtctgccgcctcctgctctgtgcccgcaccgtcagctacaatgggatcttggggcccgagtgtggcaccaagtacctgctcaacctcaacctggagcctttctctggtaaagccctgtgttcctggagcatttgttgaccgccaactgacaacatgctaggtagtgacctaaccacttagcatgtgtgatttcaccccacagacacttacatggcgctgactctggggcaggccctgtcctaagcactttataaatatcaacccacttaa

SEQ ID NO: 6928 - DNA, 1684 bp, Homo Sapiens
  NM_198970
cgggcgcgcggggagggggcgcaggaagcgggcgaggccgggcgcgggaggcggcggcggccccgggagctgccgatcggcgccgggacaaaggcgcggccgcccggcgcccccagcagcccgagccggggcgcacagccggggcgcagcccgcgccccccgccgcgattgacatgatgtttccacaaagcaggcattcgggctcctcgcacctaccccagcaactcaaattcaccacctcggactcctgcgaccgcatcaaagacgaatttcagctactgcaagctcagtaccacagcctcaagctcgaatgtgacaagttggccagtgagaagtcagagatgcagcgtcactatgtgatgtactacgagatgtcctacggcttgaacatcgagatgcacaaacaggctgagatcgtcaaaaggctgaacgggatttgtgcccaggtcctgccctacctctcccaagagcaccagcagcaggtcttgggagccattgagagggccaagcaggtcaccgctcccgagctgaactctatcatccgacagctccaagcccaccagctgtcccagctgcaggccctggccctgcccttgaccccactacccgtggggctgcagccgccttcgctgccggcggtcagcgcaggcaccggcctcctctcgctgtccgcgctgggttcccaggcccacctctccaaggaagacaagaacgggcacgatggtgacacccaccaggaggatgatggcgagaagtcggattagcagggggccgggacagggaggttgggaggggggacagaggggagacagaggcacggagagaaaggaatgtttagcacaagacacagcggagctcgggattggctaaactcccatagtatttatggtggccgccggcgggggccccagcccagcttgcaggccacctctagctttcttcctaccccattcccggcttccctcctcctcccctgcagcctggttaggtggatacctgccctgacatgtgaggcaagctaaggcctggagggtcagatgggagaccaggtcccaagggagcaagacctcgcgaagcgcagcagccccggcccttcccccgttttgaacatgtgtaaccgacagtctgcctgggccacagccctctcaccctggtactgcatgcacgcaatgctagctgcccctttcccgtcctgggcaccccgagtctcccccgaccccgggtcccaggtatgctcccacctccacctgccccactcaccacctctgctagttccagacacctccacgcccacctggtcctctcccatcgcccacaaaagggggggcacgagggacgagcttagctgagctgggaggagcagggtgagggtgggcgacccaggattccccctccccttcccaaataaagatgagggtactaaagttgtcttggtttttattttattattatttttttctttttccagtatactagcttgtcttttaagaaaggggatattaaaaaaaaaaaaagacaaaagtgtttttaaaaaaaagcaacacccacacctgtgtctgtatatagtcagcttatctcgtgttcaatcgtctgatctctacagagagaagtggaaaatgctgtatcaagggtgggcttagctgtgcctttccaataaagatgtgagaagcttcaaaaaaaaaaa

SEQ ID NO: 6929 - DNA, 2202 bp, Homo Sapiens
  NM_198971
gcgcctctccggagatggtctgaggtgggagaagagctgaagagacctggagccgacagacgggtgaaggccatgccgcctcctgggaaagttccccgaaaggagaatctgtggctacagtgtgagtgggggtcctgctcctttgtgtgctcaaccatggaaaagttctttgagcatgtcactcagcacctgcagcagcacctgcatggctctggggaggaggaggaagaggaagaggaggatgacccacttgaggaagaattctcctgcttgtggcaggaatgtggcttttgttctctggacagttctgctgacctcatccgccatgtctacttccactgctaccacaccaagctgaaacagtgggggctgcaggccttgcaaagccaggctgaccttggcccctgcatcctggacttccagagccggaacgtcatccctgatatccctgaccacttcctgtgtctgtgggagcactgtgagaattccttcgacaatcctgagtggttttatcggcatgtggaagcacacagtctgtgctgtgaatacgaagcagtcggcaaggacaacccggtggtgctgtgtggctggaaaggctgtacctgcaccttcaaggaccgcagtaaacttcgagagcacctccgcagccatacccaggagaaagtggtagcctgccccacctgtgggggcatgtttgccaacaataccaagttcttagatcacatccgtcgccagacctcattggatcagcagcacttccagtgttctcactgttccaagagatttgccacagagcggctattgcgggaccacatgcgcaaccatgtgaatcactataagtgccctctgtgtgacatgacctgcccgctgccttcctccctccgcaaccacatgcgctttcgtcacagtgaggaccggccctttaaatgtgactgttgtgactacagctgcaagaatcttattgacctccagaagcacctggatacccacagcgaggagccagcctacaggtgtgattttgagaactgcaccttcagtgcccgatccctctgctctatcaagtcccattaccgcaaagtacatgaaggagactctgagccaaggtacaaatgtcatgtgtgtgacaaatgcttcacacggggcaacaacctcaccgtgcaccttcgcaagaagcaccagttcaagtggccctcagggcatccccgttttcggtacaaggaacatgaagatggctatatgcggctgcagctggttcgctacgagagtgtagagctgacacagcaactgctgcggcaaccacaagagggatcgggcctgggaacgtcgctgaacgagagcagcctgcagggcattattctagaaacagtgccaggggagccaggacgtaaggaagaggaagaggagggcaagggtagcgaagggacagccctctcagcctctcaggacaaccccagttctgtcatccacgtggtgaatcagaccaatgcccaaggccagcaagagattgtctactatgtgctgtctgaagccccaggggagcctcccccagcccctgagccaccttcagggggcatcatggaaaagcttcaaggaatagctgaggagccagagatccagatggtttgaaggccgcagagccagaccatttcttccccaggtcctgaagtttgagccaggcaagtggcagtgcccctagtgggcagccgttgccaatggatgcctttaggagtggtgccgagagcagtgtggtccactctggcctgggtttgcatcattctgcagactctaaagacttcccttttctgccagactacattttgtggggagcctgaggactctggattctttgaggggatcctggatgtgtgtgttcttgttaaagaggctgttatcaggcttaaccataaccctcaagatctgcttgacagtgattaaatccttagctcacatccattcccatctttcgggctccttaggcccaaggatggcatgtgactggtccctgcaagggtcctttctttgtcaccagccaaggcattgataaccaagtagccattttcctcttaaggtttcctctacaaccccaaggactttcatgattatcctcagggacaggattggaggcattgagcgtgtttattaacaaattgtttttggtaataaaataaatgcttggactcttaaaaaaaaaaaaaaaaaaaa

SEQ ID NO: 6930 - DNA, 2607 bp, Homo Sapiens
  NM_198973
tctctgatcgggcccaccccctggatctagcaccgcctcttccgcgttctcggaggagcgatctgcaggtttccatgtcagaggccgatggagaactgaagattgccacctacgcacaaaggccattgagacacttcgtgtagctggaagacaccaacttcctgacaggagctttatttcatttgggatttcaagtttacagatggtatcttctcaaaagttggaaaaacctatagagatgggcagtagcgaaccccttcccatcgcagatggtgacaggaggaggaagaagaagcggaggggccgggccactgactccttgccaggaaagtttgaagatatgtacaagctgacctctgaattgcttggagagggagcctatgccaaagttcaaggtgccgtgagcctacagaatggcaaagagtatgccgtcaaaatcatcgagaaacaagcagggcacagtcggagtagggtgtttcgagaggtggagacgctgtatcagtgtcagggaaacaagaacattttggagctgattgagttctttgaagatgacacaaggttttacttggtctttgagaaattgcaaggaggttccatcttagcccacatccagaagcaaaagcacttcaatgagcgagaagccagccgagtggtgcgggacgttgctgctgcccttgacttcctgcataccaaaggcattgctcatcgtgatctgaaaccagaaaatatattgtgtgaatctccagaaaaggtgtctccagtgaaaatctgtgactttgacttgggcagtgggatgaaactgaacaactcctgtacccccataaccacaccagagctgaccaccccatgtggctctgcagaatacatggcccctgaggtagtggaggtcttcacggaccaggccacattctacgacaagcgctgtgacctgtggagcctgggcgtggtcctctacatcatgctgagtggctacccacccttcgtgggtcactgcggggccgactgtggctgggaccggggcgaggtctgcagggtgtgccagaacaagctgtttgaaagcatccaggaaggcaagtatgagtttcctgacaaggactgggcacacatctccagtgaagccaaagacctcatctccaagctcctggtgcgagatgcaaagcagagacttagcgccgcccaagttctgcagcacccatgggtgcagggggaacagcagcacaatggacctgacgctcttcgcagctgaggccatcgcccttaaccgccagctatctcagcacgaagagaacgaactagcagaggagccagaggcactagctgatggcctctgctccatgaagctttcccctccctgcaagtcacgcctggcccggagacgggccctggcccaggcaggccgtggtgaagacaggagcccgcccacagcactctgaaatgctccagtcacaccttataggccctaggcctggccaggcattgtcccctggaaacctgtgtggctaaagtctgctgagcaggcagcagcctctgctctgtggctccattcaggctttttcatctacgaaggccctgaggttcccatcaacccccatttccctagggtcctggaggaaaaagctttttccaaaggggttgtctttgaaaaggaaagcaatcacttctcactttgcataattgcctgcagcaggaacatctcttcactgggctccacctgctcacccgcctgcagatctgggatccagcctgctctcaccgctgtagctgtggcggctggggctgcagcctgcagggagaagcaagaagcatcagttgacagaggctgccgacacgtgcctcttccctctcttctctgtcaccctcctctggcggtccttccaccttcctctgtcctccggatgtcctctttgcccgtcttctcccttggctgagcaaagccatcccctcaattcagggaagggcaaggagccttcctcattcaggaaatcaaatcagtcttccggtctgcagcacggaaaagcacataatctttctttgctgtgactgaaatgtatccctcgtttatcatcccctttgtttgtgattgctgctaaagtcagtagtatcgtttttttaaaaaaaaagtttggtgtttttaaccatgctgttccagcaaagatgataccttaaactcccactgcaagcccatgaacttcccagagagtggaacggcttgctcttctttctagaatgtccatgcacttgggttttaatcagcagttccctattattctgattttaagctgttcctgtgatgaacttagagacagcatcggtgtctgctgctgtgtccccaggtcttgtgtgggtggcacagatctgggcagttagatagtgctctgtgcctaaggtgaagccacactagggtgaagcctcacttccctgtttgagcaatgcagtgcctgctgcccgtgtgcatgaaggtacagccattcagataagtggaactattgagttacataaagaaaatagatttgcatttgtcaggcagacgtttatacaacaccacggtgcttttatacattgtgcttattttaataaaactgaaattctaaaaaaaaaaaaaaaaaa

SEQ ID NO: 6931 - DNA, 2263 bp, Homo Sapiens
  NM_198976
atgcgccgcgctcgctcgcgggagggcatggcgggggccgtgccgggcgccatcatggacgaggactactacgggagcgcggccgagtggggcgacgaggctgacggcggccagcaggaggatgattctggagaaggagaggatgatgcggaggttcagcaagaatgcctgcataaattttccacccgggattatatcatggaaccctccatcttcaacactctgaagaggtattttcaggcaggagggtctccagagaatgttatccagctcttatctgaaaactacaccgctgtggcccagactgtgaacctgctggccgagtggctcattcagacaggtgttgagccagtgcaggttcaggaaactgtggaaaatcacttgaagagtttgctgatcaaacattttgacccccgcaaagcagattctatttttactgaagaaggagagaccccagcgtggctggaacagatgattgcacataccacgtggcgggaccttttttataaactggctgaagcccatccagactgtttgatgctgaacttcaccgttaagcttatttctgacgcagggtaccagggggagatcaccagtgtgtccacagcatgccagcagctagaagtgttctcgagagtgctccggacctctctagctacaattttagatggaggagaagaaaaccttgaaaaaaatctccctgagtttgccaagatggtgtgccacggggagcacacgtacctgtttgcccaggccatgatgtccgtgctggcccaggaggagcaggggggctccgctgtgcgcaggatcgcccaggaagtgcagcgctttgcccaggagaaaggtcatgacgccagtcagatcacactagccttgggcacagctgcctcctaccccagggcctgccaggctctcggggccatgctgtccaaaggagccctgaaccctgctgacatcaccgtcctgttcaagatgttcacaagcatggaccctcctccggttgaacttatccgcgttccagccttcctggacctgttcatgcagtcactctttaaaccaggggctcggatcaaccaggaccacaagcacaaatacatccacatcttggcgtacgcagcaagcgtggttgagacctggaagaagaacaagcgagtgagcatcaataaagatgagctgaagtcaacgtcaaaagctgtcgaaaccgttcacaatttgtgttgcaacgagaacaaaggggcctctgaactagtggcagaattgagcacactttatcagtgtattaggtttccagtggtagcaatgggtgtgctgaagtgggtggattggactgtatcagaaccaaggtactttcagctgcagactgaccatacccctgtccacctggcgttgctggatgagatcagcacctgccaccagctcctgcacccccaggtcctgcagctgcttgttaagctttttgagactgagcactcccagctggacgtgatggagcagcttgagttgaagaagacactgctggacaggatggttcacctgctgagtcgaggttatgtacttcctgttgtcagttacatccgaaagtgtctggagaagctggacactgacatttcactcattcgctattttgtcactgaggtgctggacgtcattgctcctccttatacctctgacttcgtgcaacttttcctccccatcctggagaatgacagcatcgcaggtaccatcaaaacggaaggcgagcatgaccctgtgacggagtttatagctcactgcaaatctaacttcatcatggtgaactaatttagagcatcctccagagctgaagcagaacattccagaacccgttgtggaaaaaccctttcaagaagctgttttaagaggctcgggcagcgtcttgaaaatgggcaccgctgggaggaggtggatgacttctttacaaaggaaaatggtagcagcttcagtgagaaactgcccttacaaacagtcccttctctgctgtcaatccaatactgctcccaaatcctgttttcagtgttcatttccctcaaggcaggcgctgggctcccacgacccctcaggacagatctggccgtcagccgcgggccgctgggaactccactcggggaactcctttccaagctgacctcagttttctcacaagaacccagttagctgatgttttattgtaattgtcttaatttgctaagaacaagtaataagtaaatttttaaaaagcctttctgctgggttggattaaaaaaaa

SEQ ID NO: 6932 - DNA, 5062 bp, Homo Sapiens
  NM_198990
acggtctctgggcggagcaatccacactgctgagcctggggtggtttggaattcttcggcgaagtggagcgggctgagagtgggtttcccgtccccgagccctccctcatctcggagatgccgcacttgtgagcgacagggcttcatttgaattttcgcacctcgcgagttgcggagcctgcatctctgaagctgcctcggtgaagagccacagcattattttttttctctttgggagagtagctgtctgggatttgagatcctatcttccctgcaaattaccaggttgcatcttcactgataggaatacatttcttcaccaaaggacatggatgaaaatgaaagcaaccagtctctgatgacaagcagccaatatcctaaagaagcagtaagaaaacgtcaaaattcagcacggaattccggagcaagtgattcttctaggttttctaggaaaagcttcaaactggattatagactagaagaagatgtaactaaatccaagaaaggaaaagatgggagatttgtgaatccgtggccaacatggaaaaacccctctattccaaatgttctcagatggctgataatggagaaagatcacagcagtgttccaagttctaaagaggaactagacaaagaactcccagtgcttaagccatattttatcactaaccctgaagaagctggagtgagggaagctggcttaagagtcacatggctgggacatgccacggtaatggtggaaatggatgagctcatatttctcacggatcccatctttagctctcgtgcttcaccatcgcagtacatgggtccaaagcgatttcgtcgttccccgtgcacaataagtgaactccctccaatagatgcggtccttatcagtcacaaccactatgaccatctggactacaattctgtcattgctttgaatgagcgatttggtaatgagttgagatggtttgtgcctttgggtctccttgactggatgcaaaaatgtggctgtgagaatgtgattgagttggactggtgggaggagaattgtgtccccggacatgataaggtcacttttgtctttacaccttcccagcactggtgtaaaaggactctaatggatgacaacaaggtgctatggggcagctggtctgtcttggggccttggaatcgattttttttcgcaggagatactggttattgccctgcttttgaagagataggaaaaagatttggaccttttgaccttgcagctattcccatcggagcttatgaaccgaggtggtttatgaaataccagcatgtagacccagaagaagctgtaaggattcacactgatgtccaaacaaagaaatctatggcaattcactggggaacttttgccttagcaaatgagcattacttagagcctccagtgaagctgaatgaagctctagagagatacggacttaacgctgaagatttttttgtcttgaagcatggagaatcaagatacctaaataatgatgatgaaaacttttaataaataatttcctgaggtgaaaaaccgatattgaagattcatttttcttttttccattcttcaggaccttcggcaaggtgagtcaaggctctctacctacctagatgtttttcagaggcctacaaatacaagtatctttcttatatgcacattctaataaatgatgaaattcagtccaacatgcttattataaacatagcaattcttgctctatcaaattagcttatatgccaaatattaaatatggtttatttaggtaagcataaaaacataggggctatcatttttaaagacttgattttctctattgtggtaaaatatataaatacatatttgccattttaaacatttaccattttaaccatttttaagtgtacagttctttcgcattaatgcacccatgaccaccattcacttaaatttttaaaagaacagtatattctttttttcctagagccttcagatgagagggaacagtatattctattgcacgtctacaattcccaaaagacctcttactttgggaggccaaggtgggtgggtcacttgaacccaggagtttgacatcaacctgggcaacatggtgacctcccgtctctctcggaaaaaaaaaaagaaaaaagaaaaagccgggtgaggtggtgtgtacctgtagtcacaggtacttgggaggctgaggtgggaggatcacttgagcccaggagatagaggctgcagtgagctgtgatcgtaccactgcactccagcctgggcgacaaaatgagaccctgtctcaaaagaaagccctctccttagctgagcagaggaagggaaggagtgtggctatgagaatatgatttatgccattttctgtttttaaatctagaagatcttctaagcacaaatacagctacaatgaaatattttacagacaaaatgttaatagaccatattctttgaattaaatttgtttttaattttctctacacattttttttttcctggagtctcttagctctaaatatatcaatcagatttataattttttttacctgattcagatgtcttacatttttatattaaatgaaccttaagcatgattcttttggtaagccagtatgaatgccagtggttggggggcggggggggagtcagttgacataagatttagtcctaataaggactctgtattcacttgattattctgacccttcctaagggagggaggtggattagataccactggaggcccattctgtattcctaatccagtctcagcactttattcatacaaaataatcaaaataggttttctacaccaaatgctacccaggcagtgctctataatttatttgcacacctgtatgtgtggtgccacgttagccactaaatctgaacttttaccctgctttcatcatggatttttttgtgtaacctgaaacaagtcaccagtgctcactgtgcctgtttcctcatttgcaacaagaggataattccgacctacctctgaaaaatgtgtagattaaatgagtttttaaagcactttagaaaatataagggagaaaatgatttcttaagatatcactgcctaatatagacaggtatatttgaaagctaaatacaggttaatgcttttgataatgtattgttcctgttgcaaatttaagcattatatattaggagactaaacattgaaaactttcactgatttttaaattggagtaatagcctaaataagtgtaaataatctttatcaaaatttagtgtttatctacaaagatgcgaatcagtcaaggggaaatgtgtatgcaatgtgtgtgtatatgatgtatgcgaacatatgtgattttggggtactaaagcacaaaaaaatcccccataaaataaaccttcctgaaaagactgatcataaactttttcactccaagcagatgtgaatcaagatgttaggtttatggtgagttagctttgaggtgtgttgccctaatactagccagcgttgttgtagccatattccctgctgctgcacgccgaattgaaaatccatctcttacctcttctctatgaagcaagccaggtatgtcttgcttaagtatttcttctccatgaatggccttaacattattttgtattcacgtgtactgtttaactgagggtctcaaagcactttaaactgttgtgttctatttccactcgtctggcctgcctcatttttctaggcccttttgtaagctgtaattttttattaccactcatgttctttctacactgacactattcattaagaacatcaagcttcatctctgcttacagaatctcaccttattgagtgggttccactttatttttcatttgttatctacattttgaagggtttatgtgcaaagtgaaaacaaattttgaaaaataagacaaatccattctcttcttcaattcagtctaatatgcattgtagtgtcttttaatcagtcttatcctctaagtcaacttcattttcctcttcgtgaatacccatagcaatatgtaagattttattgaagtttcctgtgataactgaggaatactttgctatgcctcactgcccaatagggtgggtcatcaattaggagaaatcccaaattataaaagccaacatatgccgtgacctacgtaggaaaagatgtatttgtgcatcttctttctgggtagttaaaaattactccctcttttctctagcattttgacatttcagactcaatgctctgatctctagggagtgtgattattcaaactaatgagaggacaagaagacacagttttagaatctactgctgctaaagcacattaaaaacaaatcctggtttttaatgtatgcatagtttcatatttaatgaatatgctttcattaaatagggaggtagatttgaaaaaaccgttataaagaaatgtgccttttggggaatgaatacttttgttcatgtctagcccactgggaattttgttttcaccttatactgagtcctttttctaatgtaaaaatatttcttccaagtttgatttctgtatcagggtaacattgagaacacacatatttctgtttgaggatttgtgacttcctatggaaacagtcttgcatctatgtatttacaaatgaaatttaaagtattcttaaagctttgccttaaatactgcttgcatactgatttacttaatgctaagcatggcaggggttataaatttaaatactataagacctggctgaatcccagatgtatcaataaattgttatagtagcttatggaaaatgctattaaagataaattttcatacattgtatttttagtcaagtaaaatatggatgaaaattaataaagtactgtcaagggaaaaaatatgtataaccttgtaagtgatttttctcccctttattaaaaaaagattatacaatttgggctcatattaaaaaattcaaacagtagaacagtgtgtacgtagaaggcattccccactcccactccaggagtttgggtatcattctagaagtgttctgtcaatacataagcatttttcattcaaacacacacacacacacac

SEQ ID NO: 6933 - DNA, 1097 bp, Homo Sapiens
  NM_198998
gaaccggccagctcctgctctgtcccctcaggtgtcctgcaggcacagcatctcggggggcccaggccgatggcaggtcttaacgtgtccctctccttcttctttgccaccttcgccctctgtgaggcggccaggcgggcctccaaggccctgctcccagtgggcgcctatgaagtcttcgcccgggaggcgatgaggacgctggtcgagctcgggccctgggctggggactttgggcctgacctgctgctcaccctgctcttcctgctcttcctggcgcacggggtcaccttggacggggcctcggccaaccccactgtgtccctgcaggagttcctcatggccgagcagtctctgcctggcacgctgttgaagctggcggcacaggggctgggcatgcaggccgcctgcaccctgatgcgcctctgctgggcctgggagctcagtgacctgcacctgctgcagagcctcatggcccagagctgcagctcggccctgcgcacatccgtgccccacggggcgcttgtggaggccgcctgcgccttttgtttccatctgaccctcctgcacctgcggcacagtcctcccgcctacagcgggcccgctgtggctctgttggtcaccgtcacggcctacacggccgggcccttcacgtctgccttcttcaaccctgccctggccgcctctgtgacctttgcctgctcgggacacaccttactggagtacgtgcaggtgtactggctgggccctctgacagggatggtcctggctgtgctgctgcaccagggccgccttccccaccttttccagaggaacctgttctacggccagaagaacaagtaccgagcaccccgagggaagccggccccggcctcaggggacacccagacccctgcaaaggggtccagtgtccgggagcctgggcgcagtggtgttgaggggccacattccagctgagtggccttgctctgtgtgagccccgtgcgagggccctgcttgtagctggaccctggaaccttctgtagctaagagggaatcctggccccctccccagaagccatttgtcaataaaccatttctaagaaaaaaaaaaaaaa

SEQ ID NO: 6934 - DNA, 1891 bp, Homo Sapiens
  NM_199004
ccccgcgtgtctgctaggagagggcgggcagcgccgcggcgcgcgcgatccggctgacgcatctggccccggttccccaagaccagagcggggccgggagggagggggaagaggcgagagcgcggagggcgcgcgtgcgcattggcgcggggaggagcagggatcttggcagcgggcgaggaggctgcgagcgagccgcgaaccgagcgggcggcgggcgcgcgcaccatgggggagaaacccgggaccagggtcttcaagaagtcgagccctaactgcaagctcaccgtgtacttgggcaagcgggacttcgtagatcacctggacaaagtggaccctgtagtgtttgtgaccctcacctgcgccttccgctatggccgtgaagacctggatgtgctgggcttgtccttccgcaaagacctgttcatcgccacctaccaggccttccccccggtgcccaacccaccccggccccccacccgcctgcaggaccggctgctgaggaagctgggccagcatgcccaccccttcttcttcaccataccccagaatcttccatgctccgtcacactgcagccaggcccagaggatacaggaaaggcctgcggcgtagactttgagattcgagccttctgtgctaaatcactagaagagaaaagccacaaaaggaactctgtgcggctggtgatccgaaaggtgcagttcgccccggagaaacccggcccccagccttcagccgaaaccacacgccacttcctcatgtctgaccggtccctgcacctcgaggcttccctggacaaggagctgtactaccatggggagcccctcaatgtaaatgtccacgtcaccaacaactccaccaagaccgtcaagaagatcaaagtctctgtgagacagtacgccgacatctgcctcttcagcaccgcccagtacaagtgtcctgtggctcaactcgaacaagatgaccaggtatctcccagctccacattctgtaaggtgtacaccataaccccactgctcagcgacaaccgggagaagcggggtctcgccctggatgggaaactcaagcacgaggacaccaacctggcttccagcaccatcgtgaaggagggtgccaacaaggaggtgctgggaatcctggtgtcctacagggtcaaggtgaagctggtggtgtctcgaggcggggatgtctctgtggagctgccttttgttcttatgcaccccaagccccacgaccacatccccctccccagaccccagtcagccgctccggagacagatgtccctgtggacaccaacctcattgaatttgataccaactatgccacagatgatgacattgtgtttgaggactttgcccggcttcggctgaaggggatgaaggatgacgactatgatgatcaactctgctaggaagcggggtgggaagaagggaggggatggggttgggagaggtgagggcaggattaagatccccactgtcaatgggggattgtcccagcccctcttcccttcccctcacctggaagcttcttcaaccaatcccttcacactctctcccccatccccccaagatacacactggaccctctcttgctgaatgtgggcattaattttttgactgcagctctgcttctccagccccgccgtgggtggcaagctgtgttcatacctaaattttctggaaggggacagtgaaaagaggagtgacaggagggaaagggggagacaaaactcctactctcaacctcacaccaacacctcccattatcactctctctgcccccattccttcaagaggagaccctttggggacaaggccgtttctttgtttctgagcataaagaagaaaataaatcttttactaagcatgaaaaaaaaaaaaaaaaaa

SEQ ID NO: 6935 - DNA, 4465 bp, Homo Sapiens
  NM_199044
ctttcccttttttcgctcgtgtcccgccgggtggcgctcaccacctccccggaacacgcgagtctcctgtcgcggttccggtcggaattaccccgtggagcacgccgatatggctgcgctgacactgaggggtgtccgggagctgctgaagcgtgtggacctcgcgacggtcccgcggagacatcgatataagaagaaatgggctgccacagagcccaaattccctgctgttcgactggctttgcagaattttgacatgacttacagtgtgcagtttggagatctttggccatcaatccgtgtcagtctcctctcagagcagaagtatggtgcactggtcaataactttgctgcctgggatcatgtaagtgctaagctggagcagctgagtgccaaggattttgtgaatgaagccatctcccactgggaactgcagtctgagggtggccaatctgcagccccatcccctgcctcctgggcctgcagtccgaaccttcgatgcttcacttttgacagaggggatatcagtcgcttccctcctgccagacctggcagcctgggtgtcatggagtactacctgatggatgctgcctccttgctgcctgttctggccctcggcctgcagcctggggacatcgtgcttgacctatgtgcagctcctgggggaaagacactagcgttgcttcagactggctgttgccgcaatcttgctgccaatgatctctccccgtcccgaatagccagactacagaagatccttcacagctatgtgcctgaagagatcagggatggaaatcaagttcgagttacctcatgggatggcaggaaatggggagaactggagggggacacctatgaccgggtgctggtggatgtgccctgtaccacagaccgccactcccttcatgaggaggagaacaacatctttaagcggtcaaggaagaaggagcgacagatattgcctgtgctgcaagtgcagcttcttgcggctggactccttgccaccaaaccaggaggccatgttgtctattctacctgctcactctcacacttacagaacgagtatgtggtgcaaggtgccattgagctcctggccaatcaatacagcatccaggtacaggtggaagatctgactcacttccgaagggttttcatggacacattttgtttcttctcatcctgtcaggttggggagctggtaataccaaacctcatggccaattttggccccatgtacttctgcaaaatgcgtaggctgacatagtatcacccaatccctgaagcaagaatacaaagggtatactctgttggatgcaccagaaactggaaactgggaccagtggcagagatgcactctcggtcctgtctccatcctgttcgtgtctttctgcagttttcggcaataagaagtagaagatttgctgtcctgctgtccaattgtggagcatcagcaggtttccaactcactcattaacccctaccccatctccaggcctgtactaaagtttgctgcccgcttaggggcttagaaggagaagccagtgagcaggctcacactaagttgtaaacataggagaagcatttggccaataaagttgttgaaactctatagacctggggctgcagttggggacttcatgtcagtgcaaatgccattagttccatttgtaccagccagttactgagcccctgtcacccttgaagtgagttccacctgaccagtcttgagcagccaacaggctcaattaagcccgcctggtttttccatatggctcatgatctaatttaaggaacaagtaactaaaaatgttaagccagtgcaaaataatctgcttacctactcacattggaaaaaccctctgagctgaataattctggccattcctgctgtcaacaatactgctgcccaaatgtggcttaggaggctgcttctgccacaaaaccgtcatactcttgtgcgtgccttgttctttgttcattcatctagcaggtattcccagacctcgtgtatgacaggtagctagggagctcttggagatgtagcagttgggattgtgggagattactgggcttcctcatcctttagaatggtaactctccttttgctttctgaacacctaggaatttcctgatgttttgttttgttggattccagactttttgttgtttctagtctgcagctgagctctggtgcctgttctttggcccaccccctaatccctaactcttccctcagcatcacagggcttcactgcacacactgtgttcagggcaagatttcatcatttactgactgcatactcgatatgttgtttttgtaactttagccaaaagaaagtaacctttagtggcagggatataaaaaattgctcagggtcacttgcagatattttatttttaaactttttttttttttcctggaaaacatcctgtgcagaaaagggtatataattttagaatacctgaaggcttcttggcttttccactttccttattcctcctcttcctgccactctttttgtcccttctgtctttcctgctcatccttatttgggtattagaggtgtcagttgaggagggactttagctgaggttaagccttcttttgggatttgcattgtaattgagggccctggaagatctctgagactcaaaatcaggtgaagctaggaagatggagctttaaggagcatggctagtgctctgagtaggaccgtaaccgcctccgtgcgtggcatatggtccctgcatgctgttcactctgtatagtacttagtattcgctgaggctaagaggcctcaggtgcctgggcttctgcccttggactcctggatatccagcctagtgctaattgaatgctaagcagtggtaattcaaaatgagagggtcccctgcctctagagtcatcatctaattggggacaggcagacctagataagaaaagcagagaactactttggaaaacagtttatctgctgtaattgaacattcagctaccctataacccagttaatccaatactggggataaatcctagagaaactcatacatgtacaccaggagatgtgtacaagaatattcatagcaaccctattcacaaaagcaaaagcctagaaataacccagatgcccatgagcaagagagtggacaagtaaactggaatattcacataatagaacattatacaattgtcaaatgaactataatgatacctaaccatatggatgaatctgagcaataaaataattaagtgaaaaaagtttaatcccagaagagtaaatgtagcatgatgccctttctaaatgaaaggttttttcttttctatggagttattctttacatacaatatagttcataaattttaaatatattgtttaataaattttgataattgtatataatagtatagtcaccatcaagatgtagaaaatagaaaataggctaggcacagtggctcacgcctgtaatctcaacactttgggaggccaaggtgggaagatcacttgatcccaggaattctagatcagcttggacaatgtagtgagacctggtctttaccaaaaaaaaaaaaaaaaaaattagctgggtgcgctggcatgtgcctgtggtcccagctactcaggaggctgaggcaggaggatcacttgagcacaggagtttgaggctgcagtgagcagcctgggcaagagagtgagactccgttttgtgccactgcactccagccagggtgacagagtgagactctgtctcaaaaaaaaaaaaaaaaaaaaaggcattgggatttataatgtgctgtttaaagtctgaagctcggccaggtgcggtggctcacgcctgtaatcccaaaactttggaaggctgaggcaggtggatcacctgaggtcaggaggagttcaagaccagcctggccaacgtggtgaaaccccatctctataaaagtacaaaagggcatgatggcaggtgcctgtaatctcagctactcagtaggctggagcgggagaactgcttgaacctgggaggtggaggtttcagtgagccaagatagcgccattgcactccagcgtgggcgacagcaagagacttcatttcgataaataagtaaataaataaataaagtctgaagctccactggtcactccttttattgattatttgcagctggtctaaccagttacgtatgtctggcttgattacatggccagagcaacataaaagccctgctgggaacttctgatttgagctcttccaaaaccaggatggatgcctcacatagatcatgatgattcaatccaaaggcactttgcagtgcagtccacatgtgcataaggaccatggggagcttgtatttgggaattctgagattcctgatgtttacctacctagtctttctcttgctgccctgtatcctttgcctttaaataaaaatcttaagtgataaaaaaaaaaaaaaaaaaaaaaaaaaaaa

SEQ ID NO: 6936 - DNA, 5848 bp, Homo Sapiens
  NM_199050
aagactcaggggctctcttgttggtgaacagtagcaaaatctggagtaactgtgcctggaattttttggccccaagtctaaacaaaggaatagtttccagataagcgctgtttgcataggtggtggtctgtcacgtggtgggccaggctattcagttcttggtcagcgagacgcctgccttgggtgctggatgccggctgtacgacatgcggctctcccctttccatttacagctggagttccacatgaaggagaagagagaggacctccagattagctggtctttcatcagtgtgccggaaatggccgttaatatccagcccaaagcactgggggaggaccaggtggctgagacaagtgcgatgtctgacgttctcaaggacatcttgaagcatttggctggttctgcctctccatcagtggttctgattaccaagcccacgactgtaaaggaagctcagaacttacagtgtgctgcatctactgctcaggaatcctgtcctcctaaacctccaagggctcacgagctgaagctactggtgaggaacatccacgtcttgctgctcagcgagcccggtgcctcaggccacattaatgcagtgtgcgtcgtgcagctgaacgatcctgttcagaggttctccagcaccctgacgaaaaacactccggacctcatgtgggaagaggaattcaccttcgagttgaatgccaagtcgaaggagttacacctgcagatttcagaggctgggcgatcctcagaaggtctgctggcgacggcgacagttcctctggacttatttaagaagcagccttctgggccacagagcttcacgctgaccagcgggtctgcctgcggcagctcggtgctgggctcggtcacggcagagttctcttacatggaacctggtgaattgaaatcctggcccatccctccccctgttcctgctgcaaaaatagaaaaggaccgcacggtgatgccctgtgggactgtggtcactactgtcactgctgtgaagaccaagcctcgcgtcgacgtggggagggcgtccccgctgagctctgattctccggtgaagactcccatcaaggtgaaggtgatcgagaaggacatctctgtccaggccatcgcctgccgcagcgcccccgtcagcaaaacactctcttcttcagacacagaattgttggtgttgaatggttcggatccagtggctgaagtggccattcgacagctcagtgaatcttcaaagctgaaactcaagtcgccacggaagaaaagcactattatcatatcagggatctccaagacctcactatctcaggaccacgacgctgccctgatgcagggctacacggcctctgtggacagcacccaccaggaggacgccccatcccatccggagagggcggcagcctctgccccgccagaggaagccgagtcagcccaggcatcccttgcccccaagccccaggaggacgagctagactcctgggacttggagaaggagccacaggccgcggcatggagcagccaggtcctgctggaccccgacggtgatgagctgtcagagagctccatgagtgtcttggagccgggcactgccaaaaagcataaaggaggaattctaaggaaaggtgcaaagctgttcttccgccggcggcatcaacagaaagacccaggcatgagtcagtcacacaatgaccttgtgttcctggagcagccagagggttcccggaggaaaggcatcaccctcaccaggatcctgaacaagaagctgctctccaggcacagaaacaagaacaccatgaacggtgcccccgtggagccctgcacgtagggcctgaggtcatcacctccaagccagaagacgtgcacccatgttaactaccctcaccaggacgcagccagtgtgtccgccggatgtccagatgccccgcttgtcttgctgggtttcttccaaccatctcgtcatttaaagggaaaacaaaatctgagtctccagccaggaggcttctcccagagaggacaaaaaagcccaacttgccaccagatgctaaatgagacttgacagctgcagagcttgggctgtgctcatagctaagggttagggttcaatattagaaggagattaacattataagtgaaataatatgctctaatagattgtggagggcaggtttgagggacttagtttacctattctacactaacaagtgttgttttgggtccatgcctggaccatgtcacaaaaaggaggtgcccccctgtgctgtcactgtgaatggaaaggatgggtcacctctcttcatctgctgcttggaataaaaaatgcagctggccctgagtacagggaagtggaacataggcaggattttggattaatagagaaattttgataagaatggagacgctacgacagatgtaggaagtcatctacctttgatattagccatagaacttgaacactaactatatcctatgcatagtatgcagaacacttttctaagtttactttgagcctacttgcaagtggaagatatatatattctcacatggtttttacatttttctctatcgtgttaaaagctctaataatgctagtggagcagttgacatccagggttttttttcctgcctgtcatacttgctaaacaagagcacagcgggcctgtcagatgaagtcaggagccatacgtgaccgctcgtagaacacagtaaccaaacacatacatggattttgccaagtgctgccagtagccaaaacaaagtctttttagggcaatagaggaaattattttgtgtctcaggtgtcagtcttaggaatggaagtttaataacaaatgggccaaactcgcaggacattccttctatgagcgcttcagaattttgctgtgaacagtcctcttggacacaggttggggtgcccttgtttgggtttgttttggtggaaaacatcacaaacctggcacaccatttgaatatccctaatatcattccagtcgctttcctcatcagttgcctttctatttcagttcattcacagatctcacttctgaatgtgccacttccagtagacatgctggtcaaagagcagtcatcattggggtgaagtgttcttgacagtttaatatgattcacttttctccaaagacatgtaaaaggctgttacgaaagcttggcttctgtcatggagacggaaatgggcaagcttccttccgtagcctcttgttaatccttaaacattaaatatttcgggggtaatagagccactggtgagtaaaaacctatataaaaaccaaaattataggattttttcttttttagtaaaaaccggtatcaaaaccaaaattataggatttttttcttttttagtaaaaacctatataaaaaccaaaattataggattttttcttttttagtaaaaacctatatgaaaaccaaaattataggatttttttcttttttagtaaaaacctgtataaaaaccaaaattataggatttttttttcttcttttttagagagagagattagaaaacgacattaggaatttcactttaaaatgcgcattacaaacttcttaggtgttccaggaattatcaagtgactttaaaatgacttttccaacctgctttgtttttaaaaattatattccagttttaatcattgtaaaaaaagcacctggagtttcaaaacatgtgaatactaccaagtttctgtccccaaagtcaggcatcactgttagtcttttgggacagatgggacagatgttcactttaatgttttacttgaagttttactgctctttgccatgtggtaaaaagaggctgagacatatttaagaattccaagaggatattatgtgtcagaatttcagacactgatgagaagtttttaattgttcttttttatttgattttggaattcaggtgcactctattcaagtgcaaggatatcagaagtttttttttatttaaaaaatttttttttcgagatggagtttcactctgttgcccaggctggagtgcaatggcagcttactgcaacctccacctcctggttcaagcgattctcctgcctcagcctcccaagtagctgggattacaggcacgcgccaccacacctggctaattctatttagtagaaatggagtctcaccatgttggtcaggctggtctcgaactcctgacctcaggtgatccacccaccttggcctcccagcgtgctgggattataggcatgagccaccaggccggccccaggattttatattaagccttcttgctctcaaaaaaaaaaaaaggttttaactattccatttccagatgaatcccatgagcgctgcttactgttgaataccaaggtctagggctctgcttcctgtagacacgcacacgttgtctccatccaatggccttttctgaagttacagaaaacaccaacatgggagggagtttatgaagcaaaggcaaaggcaacacgtcggctagcttcagggtagcaccgtgagaaatgggctgtattgatactgtgaatgtttgttttccaagctgttttatacaggtttgttttttcatggtgtagggtatttatgacaaagtaaatgttgtgaaggttaaagataaattaagattatccaccaaatgctaaaaatactgatgtgtaaatcacctttatcgcctcacctcttctacaagcttttgtggcttgagggcttttgtttttggcttttgtctggatgaaagttttgcccagttgtgttttaaaaacaattcctcatgaacactaagattaattgtgtctgtatctctggaactgggtgctcatgttggttttaatgagcttgcaacccttccccgtttgctttgtttaaggaggtgcctctgttctttgtggaggagtgaaatggagctttaagtgtgtgtgtgtgttatgtgtgtttgcacacacgcgtgtgttattgtagcaataacaaaaagtagccatctccttgttccagctgaaaacctgctgtgagagttttgacagagcactttattttcgtcaagtttcaagtctgagttcaaaaccagccctgatcccttatgaccaactgctactcgaccagtcgccactcagtggccacctggtgcccgtttagatttttgcttgggttttactggccacctctatagacgagagttgcaaagttgctttgagcagagagggaaagattaatttacactgctggccaccgaaggcaggtgtttcctgggtagtaatctcacggctcttgatctggaaacttcagagtacaaattggtggatggtggaaggcaggacacgtatctctgtctgacggaaaacagacctcggggctggcgtaaaccctgctgccaggccctctccccactgccccaaaccggcctagacacgaagaccaaagcagcctgcacagggcaaggcccccgcggaatcctgcagagcaaactcaggttaacttgggtccatgaccgtttgcattcgaaacacaatacactgcctcgttctctcagttagcagctgggcagcagcgcaccattcatcatttaggcttgtggtttgttgtttactctaccaatgttatgtcgaaactgcattgtaaaaagagaagaaagtggcaggttttccaggtccacggaaaggtttggcctgacgctggagtgcggtgatgaacttacgtgacaatgattgtattcctcagtagcactttaaacgccgaagacagccctgcagcaagcctgcacacgggcttgggtgggttcctttggagaagatgtggctggaacacaaacaatctttgaaagaaataaatgtgcacacagaacactacaaa

SEQ ID NO: 6937 - DNA, 5312 bp, Homo Sapiens
  NM_199072
cccaggccggctctggcctcctgacccagacagcgcagggcgcgagggatcgcgcggccgagcccgggtcgcgccgctcccagcatcggggccgctagccaagagttcgaggccttcccgatccggatgtgatgaaaaagagcaacagagggagaagtgtttcaggattgtaggagtggaagaggggaaagagaggcagagagggggaaggccccctcgcaggggagccggctggagtgagctggctggaaagagggggcggagtgcgcggagtcagagccgccaccgctgccgcagttgccgccactgcggcgtctgggctgagccggagggaggcgggaggacgcgcaggggcggccgccgccgtcgtcaggccaccggggcgaaaatgcggccgctgccggaggctcgctaactttccggggcggaagaggaggaggaggaggaggaaggggcttggagcgactacggggggatgcggagaagcagtcagttccctgcacccagcacctcacagcccttcctccgtgcgccctgccgggcggcgagctaggcggcagcggcgcggcgcgggctcggcggagcggcccatgtccggcgcgggcgaagccctcgctcccgggcccgtggggccgcagcgcgtggccgaggcgggcggcggccagctgggctccacagcccagggaaaatgtgataaagacaatactgagaaagatataactcaagctaccaatagccacttcacacatggagagatgcaagaccagtccatttggggaaatccttcggatggtgaactcattagaacccaacctcagcgcttgcctcagcttcagacttcagcccaggtgccaagtggtgaggaaataggcaagataaagaacggccacacaggtctgagcaatggaaatggaattcaccacggggccaaacacggatccgcagataatcgcaaactttcagcacctgtttctcaaaaaatgcatagaaaaattcagtccagcttgtctgtaaacagcgatatcagtaagaagagcaaagtaaatgctgtcttttcccaaaagacaggctcttcacctgaagattgttgtgtccactgtatcctggcttgcttgttctgcgaattcctgaccctttgcaacattgtcctgggacaagcgtcatgtggcatctgcacctcagaagcctgctgctgttgctgtggtgacgagatgggggatgattgtaactgcccttgtgatatggactgtggcatcatggatgcctgttgtgaatcatcagactgcttggaaatctgtatggaatgctgtggaatttgttttccttcataaatatttatcttttgtttgtgttaaaactggagagtgtttaaaaatttccttttggggggaagaaaagcacattgtaagattctcatgaaacaacatggaatttgcactgttaactcattattgtaagtaatctctgaaagcctttttactttaaccaaatctacatggtttaatatgtgaaattttaactactttaactagttttataaatttcttaatatgttacaataacttagggacattttgacaccccccttcccaaatgttaaatgccttctcctttttaccgatatttctgtttcttttaaccgttctcaggagcactttgctccaaatatattatttttcagtgtgtatttaaacgaggcagtttattttgatatgtatctattcatgattgaaaggaagcagtcttggccaggcacggtggcttacacctgtaaccctggcattttgggaggccaaggtgggcagattgcctgagctcaggagttcgagaccagccagggcaacatggtgaaaccccatctctactaaaatacaaaaagttagctgggcttggcggtgtgcgcctgtagtcccagctactcaggaggctgaggcaggagaattgcttgaacccgagaggcggaagttgcagtgagccgagattgtgccactgaactccaacctgcactccagcctgggcaacagagcgagactccatctctaaataaataaataaataaataaataaataaataaataaataaacaaaccagtctttattttaaaagaaactttaggaaacaaacccacataatagttgggaaccagtgttgatctctctcccttaccttctccacttgttcaacagactctgaatgccgactgtgtggactctcttcctcagactgtggggacagatacaattccactcctgtccacaggaacatgagatttagcagactaaggagatctgtaaagaatgaaccataccacaaggcatactgaagtgaggattataagagaaataaactcaaaatgctgttggaatatgcagagaattgctaccagaatattcagtaaggtttcagggagaatgtggcatttgaggactctcttagaatgagtgattcacctgctatttaaatgaattatttagatttttgacaaagatttaggtggacaccctaaactgtgtgtgcctttaaccagttaaaagaacagtgccttcagcatacttttttattagttgtaggaatacagctttttgaaaaagctataaagtttaaattaactaaaaatatgcattttcttacacataatttaaatgttatcatacttttttgatgaaaacataatgccttagtaaaatagctctatttaataaagaagattgagtactctgacacatttcatttaaattaggaaatttttaatattaaaatcccagtgttctgagttattgaaaggctttcttttattttgagagctttaggtctttttgggatgagaacattttagttgtttagtttgtttcttaagcagtgctattttttgtaaacacagataaatggaaaccattcttttcaatgcagaagaaatctagatatcccctactgtgaccaaatttctgtattacgattttatgttaaattaaactaatatggcaggttataatgatccttaagtgtaaagaaatcagtcaattacaagagtaattgtatagttattgagacctatagtgtgtggcttagatgaaagggagagtaaattttcataccatgctctctcctactcagtttgatctctctaaaattgtagtttggtttgatttaatataattcttagtagaaattttgaaagtatgctttgggattaataattatttttaatttttctggctgaatatcaaattgatagtaacaacagaagcataattttaggaaggctttcgcaaacctagccttttaagagaggtttttaacctgaagcatgagaatatatcacctgtggtttttcctttgagatgaaacgtagtttctagttatatcattacttaaagggcttaaaaagaaaaaacttagcaaacttttgaatctttcttttattgctatttacacatacatacacacatacaaaacctttaaattttgggatctgaatataattctggtaaacagctgtcttcatttttctcctctaaagaacttaattcatttgttacataaaatataaggaaatctttatactattttacagtaaccacaatctaaatatttacatatacccaaaattaacttatgctcatatattaggatgtgagaatatcatctgtttatggacacatgaaacctcctaatgacctggaattgttagaatatttgactttttatatgcaaagtttttcaaccaagtggtttgtctaatatttaaacatgtactggcacaatttgtgatgaaaatattagcacatttgcaataatgtttctccataacagagaatgttaatggataccagaattttatttttgtatttatgttcatagtacttttcctcttgtctactccagacagttattccataaagcatttgtataattaaaaggaaaacagaaaaaggaaaagtaggcaaatgtgaaaatagtttcaatatatcttatgatttcttaatgtaaaatgttttgttgaagtatatggctatcatgactaagtgctagaatttatagttacaggcggtgtccttttaaatgtggaaaggcttttaaaatattttaaaactggacctgtattatcctgaatacactattttgaaaatttttaaaaatgacttctttattttgctttaccgtatgtttatatctaattgacatattgactaatgtttgaaagaattcaaccataagttaaaatctgaaggttatctttatcatgtttcatccctgtctgaagatttcctagtcttcttatgtaaatcacatgactcatgtccgtaaatgaactatgaaagatatcgatcagtttatgatcattgacatgtgatttcaaaacacagtgttcttttaaaaatctataatatgtcaaaatacaagttttttttttttacatcgttttagtaagttaatttcatttatttactttggagctatatttccacttagaaaaactaaggtaattttacaatatatgctgagattaaaaaccaaggtaaaaatgatcaaacatatatgaaattgagtcttagatttaatgaatttcactcgaaaataaatgatcagaagaattttcatctaaggcatagagtggcgaaatttttgtaaatgctcgcagttagcatctaactaaaacaatacagtatgactttatttaggagaaggctttttatttagaaaattattttttcatttttacagtgtatcaactgtatccattttcctcacctggatagtcaatgttatctgagcagttcaaggagtaaccaaggcaaccttatgtaataactttccattctttatccatacaaactctttcagtgccctagattctaatgttataaacgtcaaacatcactgcccaacataaataagactcgagacttattaacataaataagtatcttgccttcttgaatgctagttaaatgcttagatttacctaactgcctaatgaatcaggttatttgttaataagattatttttcaaattatttaagacctttatgccccttccaattacttgtgatttgtaggcctgtaggattgttgcatctaatctgactggcaacagaaaatgtcatcaaatactataatatccattttgttttcttttgcactaatacaacagaacatatcatttttgttttaaacaatggttaatatattaatagggtttgttccacacttactatttatagtttttataatcaagcattgggtattaaaagagaatcctttcaacccttcatcttcgtatgcttatacaataaattgcagtgagtgt

SEQ ID NO: 6938 - DNA, 2037 bp, Homo Sapiens
  NM_199077
agtcagggaggcgaactgctgagcactggccgcggacgctccgttgcagtctcgcccaggggccggtacctgcgctcgcgccgccgggttgaaaggatgaagccgcagctggagcagccaccctatgattggctgtggcgcttgtgaacccaaagtaaagatggcgggcgggcaggcagccgccgcactgcccacttggaagatggcggcgcgccgcagcctcagcgctcgcggccgggggatcctgcaggcggctgcggggcggctgctgccgctgctcctgctgagctgctgctgcggtgcgggcggctgcgcagcggtgggcgagaatgaggagacggtgatcatcgggctgcgactggaggacacgaacgacgtgtcgttcatggaagggggggcgctgcgggtgagcgaacggacccgggtcaagctgcgggtgtacgggcagaacatcaataacgagacgtggtcccgcatcgccttcaccgagcacgagcggcggcgccacagcccgggggagcgcgggctggggggccccgcgccgccagagccggacagcggcccccagcgatgcggcatccgcacctcagacatcatcatcttgccccacatcattctcaaccgccgcacctcgggcatcatcgagatcgagatcaaaccgctacgcaagatggagaagagcaagtcctattacctgtgcacgtcgctctccacgcccgccctgggcgccggcggctcggggtccacgggtggcgccgtcgggggcaagggtggctcgggggtggccgggctcccgccgcccccgtgggccgagaccacctggatttaccacgacggcgaggacaccaagatgatcgtaggcgaagagaagaagttcctgctgcccttctggctgcaggtgatcttcatttcgctgctgctgtgcctgtcgggcatgttcagcggcctcaacctggggctcatggccctggacccgatggagctgcgcatcgtgcagaactgcggcacggagaaggagaagaattacgccaagcgcatcgagccggtgcgcaggcagggcaactacctgctgtgctcactgctgctgggcaacgtgctggtcaacaccacgctcaccatcctgctcgacgacatcgccggctcgggcctcgtggccgtggtagtctccaccatcggtatcgtcatcttcggagagatcgtgccccaggccatctgctcccggcatggcctggctgtgggggccaacaccatcttcctcaccaagtttttcatgatgatgaccttccccgcttcctacccggtcagcaagctgctggactgcgtcctgggccaggagataggcaccgtctataaccgggaaaaactgctggagatgctccgggtcaccgatccctacaacgacctcgttaaggaggagctgaacatcatccaaggggcgctggagctccgcaccaagacggtggaggacgtgatgaccccactccgggactgcttcatgatcaccggcgaagccatcctggacttcaacaccatgtctgagatcatggagagcggctacacccgcattccagtgtttgaaggggagcgctccaatatcgtggacctgctgtttgtcaaagacttggccttcgtggatcccgatgactgtacccccctgaaaaccatcaccaaattttataaccaccccttgcactttgttttcaatgacaccaagttggacgctatgctggaagaatttaagaaagaacacacaaacaagaaacccaaatcataccaacactgaaaagaagagacaataagaagcattctttctttcaacatcacagacattggcaactctaggatgtctatacagagggataaaaaggggtggcagttggctgggcgtggtggctcatgcctgtaatcccggcactttgggaggcccagggaggtggatcacttgaggtcaggagttccagactgacagtctggccaccatggtgaaaccccgtttctaataaaaatacagaaaaattaaaaaaaaaaaaaaaaaaa

SEQ ID NO: 6939 - DNA, 1935 bp, Homo Sapiens
  NM_199122
gggaagcgcgccgcgcacctcatggttccggggacagttagggcggcggatggagggtttggaatcacttgctaggagtcttgtctctctgccacccaggacatcatggcagctcacctggtaaagcgatgcacgtgcctcctgagagaagctgctcgtcaggcccctgccatggctccagttggccgactgagacttgcctgggtagcccataagactctgacttcctcagccacctcacccatttcccacctcccaggttccttgatggagccggtggagaaggaacgagcatctactccctacatagagaagcaggtggaccacctcatcaagaaggccacaaggccagaggagctcctggagctacttggtggcagtcacgacttggacagcaatcaagcagcaatggtacttatccggctctctcacttgctgtctgagaagccagaagataaaggcttgctcatacaggatgcccactttcatcaacttctctgtctgctcaacagtcagattgcctcggtctggcatggtaccctctcgaagctgctgggaagcctgtatgctctgggcatccccaaggcctccaaggagctgcagtcggtggagcaggaggtccgctggcgcatgcggaagctcaagtacaagcacctggccttcctggcagagtcctgtgccaccctctcacaggagcagcactcgcaggagctgctggctgagctgctcacacacctggaaaggcgttggacagaaattgaagattcccacacattagtgaccgtcatgatgaaggtgggacacctctcggagccactaatgaaccgcctggaagacaagcacgtcctgaacagagcgcaggacatcaccctgccccacctgtgcagcgtacttctggcttttgcgcgtctgaacttccatccagaccaagaggatcagttcttcagcctggtacatgagaagctggggtcagagctgccaggcctggagccagccctgcaggtggacctggtgtgggccctgtgtgtgctgcagcaggcacgggaagcagagctgcaagccgtcctccaccctgaatttcacatccaatttctagggggcaagtctcagaaggatcagaacaccttccagaagctgctccacatcaacgccactgccctgctggagtaccccgagtactcgggtccccttctgcctgcctcggctgtggcccctgggccctcagcccttgacaggaaggtgacccccctgcaaaaggagctgcaggagacgctgaaggggctgctggggagcgccgacaagggcagcctcgaggtggccacgcagtatggctgggtgctggatgctgaggtgctgctggacagtgacggcgagtttctgcccgtaagggactttgtggcacctcaccttgcccagccaactgggagccagtcaccacctccagggtctaagaggctagcgttcttgcggtgggagttccccaacttcaacagccgaagcaaggacttgctgggtcgctttgttctggcccggcgacacatagtggctgcaggcttcctgatagtggacgtcccattctatgagtggctggaactcaagtctgaatggcagaaaggcgcctacctcaaggacaagatgcgcaaagcggtggctgaggagctggccaagtgacttgtgccagcagcatggactgcgtgcctctccgccggaggtctagctgtgggcggccaagaagggtcacccttgaggacaaacctctgtgcaggaccttggccagagtggggagggtggccagccactctgagggacagaacgtcctcttgtgtataataaacctttaattttggtgttggacccctggggccttcccaggcttggtcaccctctgcactgtcaaaaaaaaaaaaaaaaaaaaaaaaaaaaaaaaaaaaaaaa

SEQ ID NO: 6940 - DNA, 4107 bp, Homo Sapiens
  NM_199126
tgggagtctgtggtcagtgacagagcctgtagggtcagttatggtgatcggtttctgggtgtctctggggagcccctgggccagattttcctctagactccagcccatctcttcagagcagctctgcttgagttcacagatgactgccaagcttcagacaccctacagaaaaagggttgagacccagtgtggccatgccagctaattggacctcacctcagaaatcctcagccctggctccagaggatcatggcagctcctatgagtgttaaccttgatgcctgaaagaactggaaattatgaagatagattcagaagtcaaatatgttaactaactgcattgaagagtagaagaaaacaatagcctaggatcagtgtccttcagggatgtggctatcgatttcagcagagaggaatggcggcacctggacccttctcagagaaacctgtaccgggatgtgatgctggagacctacagccacctgctctcagtaggatatcaagttcctgaagcagaggtggtcatgttggagcaaggaaaggaaccatgggcactgcagggtgagaggccacgtcagagctgcccaggagagaaattatgggaccataatcaatgtagaaaaatcctcagttataaacaagtatcctctcaacctcaaaaaatgtatcctggggagaaagcttatgaatgcgccaaatttgaaaagatattcacccagaagtcacagctcaaagtacacctgaaagttcttgcaggagaaaagctctatgtatgcattgaatgtgggaaggcttttgtacagaagccagaatttattatacaccagaaaacccatatgagagagaaaccctttaaatgcaatgaatgtggaaaatccttttttcaagtgtcgtccctcttcaggcatcagagaattcataccggagagaaactctatgaatgcagccagtgtgggaaaggcttctcttataactcagatctcagtatacatgagaaaattcatactggagagagacaccatgaatgcactgactgtggcaaagcattcacacaaaagtccacactcaagatgcatcagaaaatccatacaggcgagagatcctacatctgtattgaatgcggacaggccttcatccagaagacccatttgattgcacaccgaagaattcatactggagaaaaaccatatgagtgcagtaactgtggcaaatccttcatttccaagtcacaacttcaggtacatcaacgtgttcacacaagagtgaagccctatatatgtaccgaatatgggaaggtcttcagcaataattccaacctcgttacacataagaaagttcaaagtagagagaaatcttccatatgtactgagtgtgggaaggcctttacctacaggtcagagttgattattcatcagagaattcacactggagagaaaccttatgaatgcagtgactgtgggaaagccttcactcagaagtcagcactcacagtgcatcagagaattcatacaggagaaaaatcgtatatatgcatgaaatgtggactggccttcattcagaaggcacacttgattgcacatcaaataattcatactggagagaaacctcataaatgtggtcactgtgggaaattgtttacctccaagtcgcaactccatgttcataaacgaattcacacaggagaaaagccctatatgtgcaataaatgtgggaaggcattcaccaaccggtcaaatctcattacacatcagaaaactcatacaggagagaaatcttatatatgttccaaatgtggaaaggccttcacccagaggtcagacttgattacacatcagagaatccatactggggagaagccttatgaatgcaatacttgtggaaaagccttcactcagaagtcacacctcaatatacatcagaaaattcacactggagagagacagtatgaatgccacgaatgtgggaaagccttcaaccagaaatcaatactcattgttcatcagaaaattcatacaggagagaaaccctatgtatgcactgagtgtggaagagctttcatccgcaagtcaaactttattactcatcaaagaattcatactggagagaagccttatgaatgcagtgactgtgggaagtcctttacctccaagtctcagctcctggtgcatcagccagttcacacaggagagaaaccctatgtgtgtgccgagtgcgggaaggcctttagtggcaggtcaaatctcagtaagcaccagaaaactcataccggagaaaagccctacatttgttctgaatgtgggaagacctttcgacagaagtcagagttgattacacatcacagaattcatactggagagaaaccttatgagtgcagtgactgtgggaagtctttcactaaaaaatcacagctccaagtgcatcagcgaattcacactggagagaagccttacgtgtgtgctgagtgtgggaaggcctttactgacaggtccaatttgaataaacatcagacaacacacactggagacaaaccctacaagtgtggcatctgtgggaaaggcttcgttcagaaatcagtgttcagcgtccatcagagcagccacgcttgagagaaacagtgtgagaaaacccccctgagggttgggtctgattgtacactgttgcacgcatgcagcagaaaaatatgtatattattgtaaatagaaatgaccacagcagaatgtcacacatggctgttctggagagggcctctgagaaggcactgaatgaggcgagggacccttcctacattgtcaccatccccagtaaaccttgggtcattattcatactgacaaggaaccgagtcaatttggtgaataggaaaagccttctcatgaaaactacaatagaatactgttaccaaattcttcctaagaaagatcgtattaagttaacgataatcctgtttactgtggattaggtatagtgccaacaaattgaatgataaaacaacataatacgtagttattttgatagtgatgaatcctaagttatgtgagttgttcgttgtggaacacattgtgtaacagactcctgggtgtttttctttctcattcgaatctaccacagttggtcatatccaaccctcattcagtatttctatcaagaaagagatgctacaaaaaaaaaaagaaaaaacctttatgtatacagacgtaaacctcagaatgtatgttgagtccccactgtcatctaccaagacttgcacccccctcattatctaccatgactgtctctcagcctcacgggccctcagcactttgtgttttgacccccagcaccgtgtcttgtgaactcccatcaccttcaagaaagcttccgaggtaagaattttatggtcatctgggacaacttaaatctcccttctgctgtcatagttcttccaactcagttgcctttttttttttttcgtactcatcactgacttgaagcttagtatctggcttccttaaggatgtaactttcatgtaacagattaataacttatatgaaaaccaacacaaccatatgtttagggctggaaagggccatgacgcctggccatttttcctgttttaccttactcttatgtgtgtcacacttcatcaattccggaaacagtttctggagatctcctcattacctcttttacaatcacctcactccagcatggtgtctgttacctcttcccacttgtgacaatgtctagtaaggtccactctccattctgtgtgatgaccacttattacaaccctcagaataggggacagtggtgtgccccctgcaatacaatggtttctatctcctgatacttttattacacctctagcaggatgtcttgtgatcctccttattgatttttccctcacgatgatgaacaattatctcccgttactcacctagcagtatctaactgtccctaacacagcatgtgggaatgccctcaatacggtggatgctgttaactttcttccttcccctcaggcaatggcggtgacttacaatgaaccataatgtccacatttcccaactgtattttggagcctcttctgtccccttctttctaggaccccagttaaaaaaaaaaaaaa

SEQ ID NO: 6941 - DNA, 855 bp, Homo Sapiens
  NM_199127
gccagctctggggtctcggcaggtggtccacaacatgacctctgagttcttcgctgcccagctccgggcccagatctctgacgacaccactcacccgatctcctactacaagcccgagttctacacgccggttgatgggggcactgctcacctgtctgtcgtcgcagaggacggcagtgctgtgtccgccaccagcaccatcaacctctactttggctccaaggtccgctccccggtcagcgagatcctgttcaatgatgaaatggatgacttcagctctcccaacatcaccaacgagtttggggtgcccccctcacctgccaatttcatccagccagggaagcagccgctctcgtcaatgtgcccgacgatcatggtgggccaggacggccagcccccaagccatgctgatcacactcccatgccccaggccatcatctacaacctctggttcggctatgacgtgaagcgggccgtggaggagccccggctgcacaaccagcttctgcccaacgtcacgacagtggagagaaacattgaccaggcagtgactgcagccctggagacccggcaccatcacacccagatcgcgtccaccttcatcgctgtggtgcaagccatcgtccgcacggctggtggctgggcagctgcctcggactccaggaaaggcggggagcctgccggctactgagtgctccaggaggacaaggctgacaagcaatccagggacaagatactcaccaggaccaggaaggggactctgggggactggcttcccctgtgagcagcagagcagcacaataaatgaggccactgtgccaggctccaggtggcctccctgccctgtcaaaaaaa

SEQ ID NO: 6942 - DNA, 2258 bp, Homo Sapiens
  NM_199166
caaggcgcatgcgcagcggtcactcccgctgtatattaaggcgccggcgatcgcggcctgaggctgctcccggacaagggcaacgagcgtttcgtttggacttctcgacttgagtgcccgcctccttcgccgccgcctctgcagtcctcagcgcagtctttccacaggagccagcatacttcctgaacatggagagtgttgttcgccgctgcccattcttatcccgagtcccccaggcctttctgcagaaagcaggcaaatctctgttgttctatgcccaaaactgccccaagatgatggaagttggggccaagccagcccctcgggcattgtccactgcagcagtacactaccaacagatcaaagaaacccctccggccagtgagaaagacaaaactgctaaggccaaggtccaacagactcctgatggatcccagcagagtccagatggcacacagcttccgtctggacaccccttgcctgccacaagccagggcactgcaagcaaatgccctttcctggcagcacagatgaatcagagaggcagcagtgtcttctgcaaagccagtcttgagcttcaggaggatgtgcaggaaatgaatgccgtgaggaaagaggttgctgaaacctcagcaggccccagtgtggttagtgtgaaaaccgatggaggggatcccagtggactgctgaagaacttccaggacatcatgcaaaagcaaagaccagaaagagtgtctcatcttcttcaagataacttgccaaaatctgtttccacttttcagtatgatcgtttctttgagaaaaaaattgatgagaaaaagaatgaccacacctatcgagtttttaaaactgtgaaccggcgagcacacatcttccccatggcagatgactattcagactccctcatcaccaaaaagcaagtgtcagtctggtgcagtaatgactacctaggaatgagtcgccacccacgggtgtgtggggcagttatggacactttgaaacaacatggtgctggggcaggtggtactagaaatatttctggaactagtaaattccatgtggacttagagcgggagctggcagacctccatgggaaagatgccgcactcttgttttcctcgtgctttgtggccaatgactcaaccctcttcaccctggctaagatgatgccaggctgtgagatttactctgattctgggaaccatgcctccatgatccaagggattcgaaacagccgagtgccaaagtacatcttccgccacaatgatgtcagccacctcagagaactgctgcaaagatctgacccctcagtccccaagattgtggcatttgaaactgtccattcaatggatggggcggtgtgcccactggaagagctgtgtgatgtggcccatgagtttggagcaatcaccttcgtggatgaggtccacgcagtggggctttatggggctcgaggcggagggattggggatcgggatggagtcatgccaaaaatggacatcatttctggaacacttggcaaagcctttggttgtgttggagggtacatcgccagcacgagttctctgattgacaccgtacggtcctatgctgctggcttcatcttcaccacctctctgccacccatgctgctggctggagccctggagtctgtgcggatcctgaagagcgctgagggacgggtgcttcgccgccagcaccagcgcaacgtcaaactcatgagacagatgctaatggatgccggcctccctgttgtccactgccccagccacatcatccctgtgcgggttgcagatgctgctaaaaacacagaagtctgtgatgaactaatgagcagacataacatctacgtgcaagcaatcaattaccctacggtgccccggggagaagagctcctacggattgcccccacccctcaccacacaccccagatgatgaactacttccttgagaatctgctagtcacatggaagcaagtggggctggaactgaagcctcattcctcagctgagtgcaacttctgcaggaggccactgcattttgaagtgatgagtgaaagagagaagtcctatttctcaggcttgagcaagttggtatctgctcaggcctgagcatgacctcaattatttcacttaaccccaggccattatcatatccagatggtcttcagagttgtctttatatgtgaattaagttatattaaattttaatctatagtaaaaacatagtcctggaaataaattcttgcttaaatggtg

SEQ ID NO: 6943 - DNA, 4538 bp, Homo Sapiens
  NM_199169
tggtcgtcctccttgggttcgggtgaaagcgcttgggggttcagtgggccatgatccccgagctgctggagaactgaaggcggacagtctcctgcgaaaccaggcaatggcggagctggagtttgttcagatcatcatcatcgtggtggtgatgatggtgatggtggtggtgatcacgtgcctgctgagccactacaagctgtctgcacggtccttcatcagccggcacagccaggggcggaggagagaagatgccctgtcctcagaaggatgcctgtggccctcggagagcacagtgtcaggcaacggaatcccagagccgcaggtctacgccccgcctcggcccaccgaccgcctggccgtgccgcccttcgcccagcgggagcgcttccaccgcttccagcccacctatccgtacctgcagcacgagatcgacctgccacccaccatctcgctgtcagacggggaggagcccccaccctaccagggcccctgcaccctccagcttcgggaccccgagcagcagctggaactgaaccgggagtcggtgcgcgcacccccaaacagaaccatcttcgacagtgacctgatggatagtgccaggctgggcggcccctgcccccccagcagtaactcgggcatcagcgccacgtgctacggcagcggcgggcgcatggaggggccgccgcccacctacagcgaggtcatcggccactacccggggtcctccttccagcaccagcagagcagtgggccgccctccttgctggaggggacccggctccaccacacacacatcgcgcccctagagagcgcagccatctggagcaaagagaaggataaacagaaaggacaccctctctagggtccccaggggggccgggctggggctgcgtaggtgaaaaggcagaacactccgcgcttcttagaagaggagtgagaggaaggcggggggcgcagcaacgcatcgtgtggccctcccctcccacctccctgtgtataaatatttacatgtgatgtctggtctgaatgcacaagctaagagagcttgcaaaaaaaaaaagaaaaaagaaaaaaaaaaaccacgtttctttgttgagctgtgtcttgaaggcaaaagaaaaaaaatttctacagtagtctttcttgtttctagttgagctgcgtgcgtgaatgcttattttcttttgtttatgataatttcacttaactttaaagacatatttgcacaaaacctttgtttaaagatctgcaatattatatatataaatatatataagataagagaaactgtatgtgcgagggcaggagtatttttgtattagaagaggcctattaaaaaaaaaagttgttttctgaactagaagaggaaaaaaatggcaatttttgagtgccaagtcagaaagtgtgtattaccttgtaaagaaaaaaattacaaagcaggggtttagagttatttatataaatgttgagattttgcactattttttaatataaatatgtcagtgcttgcttgatggaaacttctcttgtgtctgttgagactttaagggagaaatgtcggaatttcagagtcgcctgacggcagagggtgagcccccgtggagtctgcagagaggccttggccaggagcggcgggctttcccgaggggccactgtccctgcagagtggatgcttctgcctagtgacaggttatcaccacgttatatattccctaccgaaggagacaccttttcccccctgacccagaacagcctttaaatcacaagcaaaataggaaagttaaccacggaggcaccgagttccaggtagtggttttgcctttcccaaaaatgaaaataaactgttaccgaaggaattagtttttcctcttcttttttccaactgtgaaggtccccgtggggtggagcatggtgcccctcacaagccgcagcggctggtgcccgggctaccagggacatgccagagggctcgatgacttgtctctgcagggcgctttggtggttgttcagctggctaaaggttcaccggtgaaggcaggtgcggtaactgccgcactggaccctaggaagccccaggtattcgcaatctgacctcctcctgtctgtttcccttcacggatcaattctcacttaagaggccaataaacaacccaacatgaaaaggtgacaagcctgggtttctcccaggataggtgaaagggttaaaatgagtaaagcagttgagcaaacaccaacccgagcttcgggcgcagaattcttcaccttctcttcccctttccatctcctttccccgcggaaacaacgcttcccttctggtgtgtctgttgatctgtgttttcatttacatctctcttagactccgctcttgttctccaggttttcaccagatagatttggggttggcgggacctgctggtgacgtgcaggtgaaggacaggaaggggcatgtgagcgtaaatagaggtgaccagaggagagcatgaggggtggggctttgggacccaccggggccagtggctggagcttgacgtctttcctccccatgggggtgggagggcccccagctggaagagcagactcccagctgctaccccctcccttcccatgggagtggctttccattttgggcagaatgctgactagtagactaacataaaagatataaaaggcaataactattgtttgtgagcaacttttttataacttccaaaacaaaaacctgagcacagttttgaagttctagccactcgagctcatgcatgtgaaacgtgtgctttacgaaggtggcagctgacagacgtgggctctgcatgccgccagcctagtagaaagttctcgttcattggcaacagcagaacctgcctctccgtgaagtcgtcagcctaaaatttgtttctctcttgaagaggattctttgaaaaggtcctgcagagaaatcagtacaggttatcccgaaaggtacaaggacgcacttgtaaagatgattaaaacgtatctttcctttatgtgacgcgtctctagtgccttactgaagaagcagtgacactcccgtcgctcggtgaggacgttcccggacagtgcctcactcacctgggactggtatcccctcccagggtccaccaagggctcctgcttttcagacaccccatcatcctcgcgcgtcctcaccctgtctctaccagggaggtgcctagcttggtgaggttactcctgctcctccaacctttttttgccaaggtttgtacacgactcccatctaggctgaaaacctagaagtggaccttgtgtgtgtgcatggtgtcagcccaaagccaggctgagacagtcctcatatcctcttgagccaaactgtttgggtctcgttgcttcatggtatggtctggatttgtgggaatggctttgcgtgagaaaggggaggagagtggttgctgccctcagccggcttgaggacagagcctgtccctctcatgacaactcagtgttgaagcccagtgtcctcagcttcatgtccagtggatggcagaagttcatggggtagtggcctctcaaaggctgggcgcatcccaagacagccagcaggttgtctctggaaacgaccagagttaagctctcggcttctctgctgagggtgcaccctttcctctagatggtagttgtcacgttatctttgaaaactcttggactgctcctgaggaggccctcttttccagtaggaagttagatgggggttctcagaagtggctgattggaaggggacaagcttcgtttcaggggtctgccgttccatcctggttcagagaaggccgagcgtggctttctctagccttgtcactgtctccctgcctgtcaatcaccacctttcctccagaggaggaaaattatctcccctgcaaagcccggttctacacagatttcacaaattgtgctaagaaccgtccgtgttctcagaaagcccagtgtttttgcaaagaatgaaaagggaccccatatgtagcaaaaatcagggctgggggagagccgggttcattccctgtcctcattggtcgtccctatgaattgtacgtttcagagaaattttttttcctatgtgcaacacgaagcttccagaaccataaaatatcccgtcgataaggaaagaaaatgtcgttgttgttgtttttctggaaactgcttgaaatcttgctgtactatagagctcagaaggacacagcccgtcctcccctgcctgcctgattccatggctgttgtgctgattccaatgctttcacgttggttcctggcgtgggaactgctctcctttgcagccccatttcccaagctctgttcaagttaaacttatgtaagctttccgtggcatgcggggcgcgcacccacgtccccgctgcgtaagactctgtatttggatgccaatccacaggcctgaagaaactgcttgttgtgtatcagtaatcattagtggcaatgatgacattctgaaaagctgcaatacttatacaataaattttacaattctttggaaaaaaaaaaaaaaaaaa

SEQ ID NO: 6944 - DNA, 2082 bp, Homo Sapiens
  NM_199176
gtcacgacgtccgcgcagctgcggtcgccgccgtcgcacgagtctttccttagtaacctgggcgatagctggtcttattctttttagtggatgtttccaaggattgtcttcagtcatggccttgggattaaagtgcttccgcatggtccaccctacctttcgcaattatcttgcagcctctatcagacccgtttcagaagttacactgaagacagtgcatgaaagacaacatggccataggcaatacatggcctattcagctgtaccagtccgccattttgctaccaagaaagccaaagccaaagggaaaggacagtcccaaaccagagtgaatattaatgctgccttggttgaggatataatcaacttggaagaggtgaatgaagaaatgaagtctgtgatagaagctctcaaggataatttcaataagactctcaatataaggacctcaccaggatcccttgacaagattgctgtggtaactgctgacgggaagcttgctttaaaccagattagccagatctccatgaagtcgccacagctgattttggtgaatatggccagcttcccagagactatgaagcaaataaaacaatactttaatgggccaaatgtggcctgagggccaccaatttgtgacctctgcattagtatttggagcagaccctccaggaagtccttttatactagactgaccattgcagaatattgcatggagcacagtgcttccaaaactggaaggaattggcctggattaggagtcttagagtacctggaatccggtcccatctctaccaccaactggctgtttgaccttgggcaagttgcttcactctctgggcctccatttcctcatctgctaatataagtgtacagctgcagctatcaaggctataagagaaagtggaatgaatctgaacccagaagtggaagggacgctaattcgggtacccattccccaagtaaccagagagcacagagaaatgctggtgaaactggccaaacagaacaccaacaaggccaaagactctttacggaaggttcgcaccaactcaatgaacaagctgaagaaatccaaggatacagtctcagaggacaccattaggctaatagagaaacagatcagccaaatggccgatgacacagtggcagaactggacaggcatctggcagtgaagaccaaagaactccttggatgaaagtccactggggccagcaatactccagagcccagtttctgctggatcccatgggtggcacattgggacttctctccctcccccatctacacagaagactgtcaccatgctgacagaagcctgtccttgtaaggcccagccttccaggggaacactcagacatgttcattctcttcctgcttctgctctgggccggtgggtggctctcagaaaatacttgctgctggcaaaaggcctgtactcaggcatttgctttgacttgatgttgccaagggactgaggccattggcaggcttagtaccacctgctcctcatcttaggagtctccttttcaaataattaggctctgttcccattttaaaactctgatattggccttcacctgtgactggacactttactagaggcccattttcactaaacaataaaatctaaataaattggaaggaataacaaccacaaaggaaagaatagagttggtctggattgatgatcactgaggatctgtatgtgaggcacccataacagtagttttgcctgtgagtcgtcttcacacatgctgttttctctgcctggctctctcttcccctccttacctggccagtcctgtttatcatcaggccttgtcttggatatcacgtcctctgggaagtcttcttttcccctctaacctaggaccctcattaccggctctcatagcacagtctactgctttgtacgaattctaagtattcttgttgcacttaattagcctgtatatcctcagaactttgtgtaatgcctggagcatagtaggcagtcatatgttgtatcgtgaataaattgcacatagtagctacccagcaaaaaaaaaaaaaaaaaaaaaaaaaaaaaaaaaaaaaaa

SEQ ID NO: 6945 - DNA, 1540 bp, Homo Sapiens
  NM_199177
tggatgtttccaaggattgtcttcagtcatggccttgggattaaagtgcttccgcatggtccaccctacctttcgcaattatcttgcagcctctatcagacccgtttcagaagttacactgaagacagtgcatgaaagacaacatggccataggcaatacatggcctattcagctgtaccagtccgccattttgctaccaagaaagccaaagccaaagggaaaggacagtcccaaaccagagtgaatattaatgctgccttggttgaggatataatcaacttggaagaggtgaatgaagaaatgaagtctgtgatagaagctctcaaggataatttcaataagactctcaatataaggacctcaccaggatcccttgacaagattgctgtggtaactgctgacgggaagcttgctttaaaccagattagccagatctccatgaagtcgccacagctgattttggtgaatatggccagcttcccagagtgtacagctgcagctatcaaggctataagagaaagtggaatgaatctgaacccagaagtggaagggacgctaattcgggtacccattccccaatcagccaaatggccgatgacacagtggcagaactggacaggcatctggcagtgaagaccaaagaactccttggatgaaagtccactggggccagcaatactccagagcccagtttctgctggatcccatgggtggcacattgggacttctctccctcccccatctacacagaagactgtcaccatgctgacagaagcctgtccttgtaaggcccagccttccaggggaacactcagacatgttcattctcttcctgcttctgctctgggccggtgggtggctctcagaaaatacttgctgctggcaaaaggcctgtactcaggcatttgctttgacttgatgttgccaagggactgaggccattggcaggcttagtaccacctgctcctcatcttaggagtctccttttcaaataattaggctctgttcccattttaaaactctgatattggccttcacctgtgactggacactttactagaggcccattttcactaaacaataaaatctaaataaattggaaggaataacaaccacaaaggaaagaatagagttggtctggattgatgatcactgaggatctgtatgtgaggcacccataacagtagttttgcctgtgagtcgtcttcacacatgctgttttctctgcctggctctctcttcccctccttacctggccagtcctgtttatcatcaggccttgtcttggatatcacgtcctctgggaagtcttcttttcccctctaacctaggaccctcattaccggctctcatagcacagtctactgctttgtacgaattctaagtattcttgttgcacttaattagcctgtatatcctcagaactttgtgtaatgcctggagcatagtaggcagtcatatgttgtatcgtgaataaattgcacatagtagctacccagcaaaaaaaaaaaaaaaaaaaaaaaaaaaaaaaaaaaaaaa

SEQ ID NO: 6946 - DNA, 3728 bp, Homo Sapiens
  NM_199181
gatgtgttttctgcctttctggactactttgcctctaagatgcagaaactgagtacaagggaaaggactccaaatccccagtatgtcccctgcaggagcagagttgaaggaggtcccaccaggtctggtgggtggccctgctcaggcttacctcccccttgtaggggtcactgggaactgtcaactgcgaaggactgtgatctccagtctggtatggtctgctctggggtccaagtgaggaaagcataaatcgggcaactctctcccagtgagaagatagaaggagcttctacagagaaggacgagattgaggagctgcgggccgagatgctggagatgcgggacgtctatatggaggaggacgtgtatcagctgcaggagctgcgacagcagctggaccaggccagcaagacctgccgcatcctgcagtaccggctgcgcaaagccgagcgccgcagtctccgtgccgcccagaccggccaggtggacggcgagcttatccgtggtctggagcaggatgtcaaggtctctaaggacatctccatgcggctgcataaggagctcgaggtggtggagaagaaacgggcgcggctggaggaggagaacgaagagcttcgtcagcggctcatcgagactgagctggctaagcaggtgctgcagacggagctggagcgaccgagagagcattccttgaagaaaagaggaacccgctccctggggaaggccgataagaagactttggtgcaggaggacagtgcagacctgaagtgccagttgcactttgcaaaggaggagtcagccctcatgtgcaagaagctcactaagcttgccaaggagaatgacagcatgaaggaggagctgctgaagtaccgctcgctctatggggacctggacagcgcgctgtcagccgaggagctggccgatgccccccactcgcgggagaccgagctgaaggtgcacctgaagctggtggaggaggaagccaacctgctgagccgccgcatcgtggagctggaggtggagaaccgaggcctgcgggctgagatggacgacatgaaggatcatggaggtggctgtgggggtcctgaggcacgcctggccttctccgcgctgggtggcggagagtgcggggagagcttggcagagctgcggcgacacctgcagtttgtcgaagaggaggccgagctgctgcggcgctcctctgccgagctcgaggaccagaacaagctgctgctgaacgagctggccaagttccgctcggagcacgagctggacgtggcgctgtcggaggacagttgttctgtgctcagcgaaccttcacaggaggagctggcggccgccaagctgcagatcggcgagctcagcggcaaggtcaagaagctgcagtacgagaaccgcgtgctcctctccaacctccagcgctgtgacctcgcctcctgccagagtacgcggcccatgctggagacggacgccgaggccggggactctgcccagtgtgtgcctgctcccctgggcgagacacacgagtcccatgcggtccgactctgcagagccagggaggccgaggtgctgcctgggctgagagagcaggccgccctggtcagtaaggccatcgatgtcctggtggctgatgccaatggcttcacggctggcctccggctgtgtctggacaacgagtgtgctgacttccggctgcatgaggcccccgacaacagcgagggccccagggacaccaagctcatccatgccatcctggtgcgcctgagcgtgctgcagcaggagctgaatgccttcacgcggaaggcagatgcagtcctcgggtgctctgtcaaggaacagcaggagtccttctcatcactgccccccttgggctcccaggggctctctaaggagattcttctggcaaaagaccttggctcagactttcagccacctgacttcagggacctgccggaatgggagcccaggatccgagaggctttccgcactggtgacttggactctaagcccgaccccagccggagcttcaggccttaccgagctgaagacaatgattcctatgcctctgagatcaaggagctgcagctggtgctggctgaggcccacgacagcctccggggcttgcaagagcagctctcccaggagcggcagctacgaaaggaggaggccgacaatttcaaccagaaaatggtccagctgaaggaggaccagcagagggcgctcctgaggcgggagtttgagctgcagagtctgagcctccagcggaggctggagcagaaattctggagccaggagaagaacatgctggtgcaggagtcccagcaattcaagcacaacttcctgctgctcttcatgaagctcaggtggttcctcaagcgctggcggcagggcaaggttttgcccagcgaaggggatgacttcctcgaggtgaacagcatgaaggagctgtacttgctgatggaggaagaggagataaacgctcagcattctgataacaaggcctgcacgggggacagctggacccagaacacgcccaatgagtacatcaagacactggccgacatgaaggtgacgctgaaggagctgtgctggctgctccgggatgaacgccgtggtctgacggagcttcagcaacagtttgccaaggccaaggctacctgggagacagagcgggcagagctcaagggccatacctcccagatggagctgaagacagggaagggggccggggagcgggcagggcccgactggaaggcagccctacagcgggagcgtgaggagcagcagcacctcctagctgagtcctacagcgctgtcatggagctgactcggcagctgcagatcagtgagcgcaactggagccaggaaaagctgcagctggtggagcggctgcagggtgagaagcagcaggtggagcagcaggtgaaggagctgcagaaccgcctaagccagctgcagaaggctgccgacccctgggtcctgaagcactcggagctggagaagcaggacaacagctggaaggagacacgcagtgagaagatccacgacaaggaggctgtttccgaagttgagcttggaggaaatggtttaaagagaaccaaatctgtttcttccatgtctgagtttgaaagtttgctcgactgttccccttaccttgctggcggagatgcccggggcaagaagctgcctaacaaccctgcctttggctttgtgagctccgagccaggggatccagagaaagacaccaaggagaagcctgggctctcgtcgagggactgcaaccacctgggtgccctggcctgccaggaccccccagggagccagaagctgcccttcctcctcatcctggcccctccccagcccccgccaatactgtgaacccccttcccactcagcctggtttcctggtgagggtcctgcagtcatgggccctgggggacccccagggcaaggcccatgggagggaagggaccaagggcatccttgggccaactgtccacctctcttgtccactattctctcctttccacttctgtcttcaaaaggctccttcctaggatggatcgggtgctaggacaactgcagtccaatccaccagctctccctgcccctgtgtcttatttcagacatgagaataactgtacagtgtaaacttataaagcgtttttaatggttgtagattggaaataaagtatgtcatatgaacagctaaaaaaaaaaaaaaaaaa

SEQ ID NO: 6947 - DNA, 813 bp, Homo Sapiens
  NM_199184
gcgcgggcggctggggaatggctgctgccatggtgccggggcgcagcgagagctgggagcgcggggagcctggccgcccggccctgtacttctgcgggagcattcgcggcggacgcgaggacaggacgctgtacgagcggatcgtgtctcggctgcggcgattcgggacagtgctcaccgagcacgtggcggccgccgagctgggcgcgcgcggggaagaggctgctgggggtgacaggctcatccatgagcaggacctggagtggctgcagcaggcggacgtggtcgtggcagaagtgacacagccatccttgggtgtaggctatgagctgggccgggccgtggcctttaacaagcggatcctgtgcctgttccgcccgcagtctggccgcggtgagcaccccaagcctccctcctggctttctatggacccagccctcagctccttccctggtgggctctgagcaccgcgcctctcccaaggggtaagggagctgtgagggtgtggatgggaggcagcttcacctttccctgccctttccagtgctttcggccatgatccggggagcagcagatggctctcggttccaggtgtgggactatgaggagggagaggtggaggccctgctggatcgatacttcgaggctgatcctccagggcaggtggctgcctcccctgacccaaccacttgacttaatctcactttcttaaattcttctattctcagacactgctctagtaccattccttcctcttagccccaggagcaaattaaaaggtacagttaaaatcctaaaaaaaaaaaaaaaaaa

SEQ ID NO: 6948 - DNA, 2121 bp, Homo Sapiens
  NM_199186
ccaataggcagagccctaggacctgcccacgtctggttcaggggctagaaaagagcgtcgatgccggcggcagtgatgagtcctaggaggcgctggctctttggcggctcggaggagcggctgctgctgctgctgctgctgctggtggcccctttgcagaaaagttctaagaacagtgctgttggctcagtgagatgaggttatcggaaaactttctgtttacacaagagttgcctccttcaaagaagcatgcatggtccttgcaggtcactgtgcccatcactctgcatagtccagctgcactctgcttcacacagctgcctgcccattgcaggcatttgagtttgcaatccatgccttaaactttaaatcacactggctacagcgttgtgtgtttcttggtaaacactgggtaaatcagctcctgtggatgttgactgaagtttctatgtttgcaagctaatcctcagcagtttctttatgtattgctgtccttgaatattagcccatttgaaaacgcctgggaagttcagccatcagtatgtccaagtacaaacttattatgttaagacatggagagggtgcttggaataaggagaaccgtttttgtagctgggtggatcagaaactcaacagcgaaggaatggaggaagctcggaactgtgggaagcaactcaaagcgttaaactttgagtttgatcttgtattcacatctgtccttaatcggtccattcacacagcctggctgatcctggaagagctaggccaggaatgggtgcctgtggaaagctcctggcgtctaaatgagcgtcactatggggccttgatcggtctcaacagggagcagatggctttgaatcatggtgaagaacaagtgaggctctggagaagaagctacaatgtaaccccgcctcccattgaggagtctcatccttactaccaagaaatctacaacgaccggaggtataaagtatgcgatgtgcccttggatcaactgccacggtcggaaagcttaaaggatgttctggagagactccttccctattggaatgaaaggattgctcccgaagtattacgtggcaaaaccattctgatatctgctcatggaaatagcagtagggcactcctaaaacacctggaaggtatctcagatgaagacatcatcaacattactcttcctactggagtccccattcttctggaattggatgaaaacctgcgtgctgttgggcctcatcagttcctgggtgaccaagaggcgatccaagcagccattaagaaagtagaagatcaaggaaaagtgaaacaagctaaaaaatagtctttctcaactgttggctaagaagaaatgcaaaagaagtggcataggagtgtgttatgggtgctgaactctctctctttttccccgattttccagagctaggctgtggagtagagtttgtataggtaactaggtaacttattgtggcccagataaggctttaggatgcctcagtgcttatgtcatagccttatgagttagctttcttgctagccccctagtcggtcaccaaactagtaactagtggggcttaatgaaggtcataagtttctgagatgggagagcaacaagtagagatgaagttaaaggtatttatcattcaagaaatcattattgagtcaccattgacaggcactattctaatcagtagttcactttaatatttaataagattttctgggataacagtaagggatattagataatataccgtatgtatttattactagtcttttcctctaggaaaagggatactttgataattaaggccagaggcccattagttgagaaagtcacagatatatttctccaagaaagccaacaaccaccaccacaatgacagaaatgacaacaaggccctttaacttgtcttctagtttagagacatccttcatttgacatttagtagaattcctctttggccacaagaataagcagcaaataaacaactatggctgttgaggttctcattttggtttgttttaattttttgaactttgggtacctgtaattagtttaaaaataaagttcctgataataaagtgactgaaaatggcatccccaaaaaaaaaaaaaaaaaa

SEQ ID NO: 6949 - DNA, 1791 bp, Homo Sapiens
  NM_199192
gcttcggggccgcagagggggcggggcgggacgtccggggagtgcgcacgcatcctgcccgcggcgcgcgcgcaggtcggtgcgtctgtcgggggcgcgctcgggtacctgtaccccacgtagtcgccggttaccgatcggactaagttccagtggtgatttacaagtcaagttaaaatgtccccagaagtggccttgaaccgaatatctccaatgctctcccctttcatatctagcgtggtccggaatggaaaagtgggactggatgctacaaactgtttgaggataactgacttaaaatctggctgcacatcattgactcctgggcccaactgtgaccgatttaaactgcacataccatatgctggagagacattaaagtgggatatcattttcaatgcccaatacccagaactgcctcccgattttatctttggagaagatgctgaattcctgccagacccctcagctttgcagaatcttgcctcctggaatccttcaaatcctgaatgtctcttacttgtggtgaaggaacttgtgcaacaatatcaccaattccaatgtagccgcctccgggagagctcccgcctcatgtttgaataccagacattactggaggagccacagtatggagagaacatggaaatttatgctgggaaaaaaaacaactggactggtgaattttcagctcgtttccttttgaagctgcccgtagatttcagcaatatccccacataccttctcaaggatgtaaatgaagaccctggagaagatgtggccctcctctctgttagttttgaggacactgaagccacccaggtgtaccccaagctgtacttgtcacctcgaattgagcatgcacttggaggctcctcagctcttcatatcccagcttttccaggaggaggatgtctcattgattacgttcctcaagtatgccacctgctcaccaacaaggtgcagtacgtgattcaagggtatcacaaaagaagagagtatattgctgcttttctcagtcactttggcacaggtgtcgtggaatatgatgcagaaggctttacaaaactcactctgctgctgatgtggaaagatttttgttttcttgtacacattgacctgcctctgtttttccctcgagaccagccaactctcacatttcagtccgtttatcactttaccaacagtggacagctttactcccaggcccaaaaaaattatccgtacagccccagatgggatggaaatgaaatggccaaaagagcaaaaagagagagcaacagagatggggaggaatccagctctgcctgacatccaggcatcctctccaaattgcatagggcttatttcaaaacctttgtccctcagttccaggaggcagcatttgccaatggaaagctctaggaaacaccagtcttgagaggtggccagccagactgcctgtccacatgcgtgtcagcacatacagccgcttcctggaagccgcctggaatgtcttcacggcagcgttttgctcacacagcagcttttgcacgccccaggcagccccgactgctgaaatccaacttgagctggctggtggtccctggatcctagagcccttcacttcgggttactccctctttcttgcctctatttcttagttggaagaaataaactcacaaattatggtgcagtaattttccggggaaagtaaagcctcaggaatgcccacgcctttcttccaaagcctttgtctctgagacctcttaagttctaagattaaatgcccctcgctgttcttcctctgaaaaa

SEQ ID NO: 6950 - DNA, 3151 bp, Homo Sapiens
  NM_199245
agtaagttccagcgcagctagaccgcggggtagtcggcgcgaggcggagcttggcagttccgtccacttcagccgcagcgtccctcgccgggtgtctcgccgcagcctccggagaggaacagaccctcactctctctgtcagaaaaatgtctgctccagctcagccacctgctgaagggacagaagggactgccccaggtgggggtccccctggccctcctcctaacatgaccagtaacagacgactacagcaaacccaggcacaagtggaggaggtggtggacatcatacgtgtgaacgtggacaaggtcctggagagggaccagaagctgtcagagctggatgaccgagctgatgccttgcaggcaggagcatcacaatttgagagcagtgctgccaagctaaagaggaagtattggtggaaaaactgcaagatgatgatcatgctgggagccatctgtgccatcatcgtggtagttattgtaagtaagtatcgctgaagttgctggtggggtgaagaggtgggaaggtcctggagtcttctccctgcctgcctgcctgcctggggagtggggctgctctgactgaggtatggagaccgctgctatgggatcgtcacctggttcgggacgggggaagggcagagacaagggatttctttgatggacaagccttccccctgcaacgcattgcagggagatggcgcctcctgttctgaggaagtggggctatgctgtgtgtcactggcttgggttggagggagaccatggggatggggcacttaacaatggagagacctgaatgtctggtaacttggtgtaattcaccctcttgttttctcctgtctctttctcttttccgtctgggacttcctgattcctgtgtccagtctacttttttacttgagaatgtaccaccccttccctgttgtccattgccatccacattcatgtcctctgccctctgtttgctctctcaacacacttccccacccaccgtcctccattccagcccaggcttctccatcacccattcctcctttttcgttgcgttcatttgcactctgtccctcaacactagaaatgctgctcgtggcacaatctaagtcattacccgaagagcaacagctggcgcctcctccctgcctgctttttctgtactctcaagttcccccaaagccccaaagagttggaggccaagggaaggggcagggaggggagtggctgaggcgaagtacccatgaagctgcccagacttgggaggagaagagtatcggtgcccatggtgacttctagaaaacctggccactggtaggagctagggaggggctgggaagatggcagctcactcagtactgcctggtcatgtggagctttccttcctggaccaggcctggagagggtcctgggggtggaccaaagtccaacttggtttcagtgcagtacccttttcgaaagtaaaaacttgttttttgtagttatttctaatctgttcgtccaggattttccgtgtctttggggatcttacaactttactttgttctccagaggcctggagaacacttagggattgtgaaaatagcaggacttgtttccatcctagaagcagtcccatgtgcttctagctggaaggagctttctcttctttacattttctacagcattctgtatgagggcaccaaataaatccatctagctggtagttttatctagccaaataatttaacctagctcccagttaattgttggcataaagagagagattgcctgttagttatagagaaacagtgagtcaagtgcttaatttgaaagtaacaagctcagaggaagccactccttgccctcgttaaagagggtcctgttcctctcttcctgttgatgaaggagcgtgagggtgttagcagtgtgagatctttggacacccatggaatcctttcctccacaccacccgtgcacttgccaaagacagggatgaggcaagtggttcttcctggggcccggccgatcctcaggatgcagagaagtcatgtagacccaccagccccaccttggggggaggcgtgccagcctgtgtcaggtgtgcttgtgtattgctgtgctgtcatggggccctctccttgagagccgcctctctgttcttcctgtagtatattcccctttgaaccaccctttcctgtctgaattctactttgcctcctttctcttcctcctctttgcatggtttgtgtgtatagacagtggaacctgaggatgggatctgctcagcctatcttcggggcaattgctgagcttcaggatgggctattaatgtgggataagcccaggtgcaaggggaggagggcaggctgggaacagagcggagaatgcccatggccctttattccttcttccctcggtccacgaacaggaagaggctgaggccatgctgggcagggtctggatgcccactttccatgcagcagcatttcattgctcaaaaccatccttcctttcctttcgcccttgtttcccacattcccttcgtcctgcccaagggcgggactgaagagctggaagaaagcagtcagtaccctcccaacggcccccctcgaaggtctccactctcctctgggctcctccttgcctaatgcagggggtcaccgctggagaagaaccaccactgtcctcgatgtgtcccaagcctggagcgaatccgtcctcttggctctcccagccctatcacaggaatcattcctgggtttctgtccctctgaggctcaccaggtgtagttggccttgttctttgggggtattagcccttctactttctttctcacccaccctgtaccctcttctgtgtgtctctgctatccccctttcctcccaccacccatgtgcatgagcaaatgtgcaacaaaaccctgggactttgcagtcaaatgaagctgagcttcccacatcccgttcttcggtttgccatgagacgatgtggggtttccactgtgtgtctgtcatcacctctttgtctttttttcctaaccctgatctcatacttgtatagagtaataacaacagttgtacttccaccaaaggcatgtggcatatttaccaatgtcatgtattctgaacaaaggcaaaaaatacaaattcctaccattaaaaaaaaaaaaaaa

SEQ ID NO: 6951 - DNA, 1529 bp, Homo Sapiens
  NM_199250
aaatggggtttcccaaacaggcgtgtgtattggacgcctcgggcggagcgcgggctggcgccgaggaccggccttgcgagcggcgcgcactataaaatggcgcgtgctgcaacccgcgcccgcttcggagagagaaatgctggggtgcagcttcaagcttaggaccacccaccatgcctatccaggtgctgaagggcctgaccatcactcattaagaacagaggaggctgcctgttactcctggtgttgcatccctccagacactctgctgtttcctgcctaggcgtggctgcagccatggctaggaaagcgctgccacccacccacctgggccagagctggttctgctcctgctgcagggacactgagctggctatctcggcgcttcgggcaagaactgcaacaggctctcctgggtcctgcaggtgtacagccgggcccctgccttgtgcctcagctctcgagagctgctgctgccgggtgacctgatccaacctgataaggtgccatcttcagctaccactgcaaggccctgagggcaacagcagcacggcactgcccacccggctgctgatggcctggtgccagctgggagtcctcccggcacttcgaggccactgagccacccttccagccccagcccaccatggacaggggtatccagcttcctcctcaacctcgtcctctgcccctgagccagtgacgcccaaggacatgcctgttacccaggtcctgtaccagcactagctggtcaagggcatgacagtgctggaggccgtcttggagatccaggccatcactggcagcaggctgctctccatggtgccagggcccgccaggccaccaggctcatgctgggacccaacccagtgcacaaggacttggctgctgagccacacacccaggagaaggtggataagtgggctaccaagggcttcctgcaggctaggggaggagccacccccgcttccctattgtgaccaggcctatggggaggagctgtccatacgccaccgtgagacctgggcctggctctcaaggacagacaccgcctggcctggtgctccaggggtgaagcaggccagaatcctgggggagctgctcctggtttgagctgcattcaggaagtgcgggacatggtaggggaggcaaaaagccttgggcactaccctccctgtggagctgttcggtgtccgtcgagctagccacaccctgacaccatgttcaagggtaccggaagagaagggtgtctgcccccaacctcccctgtgggtgtcactggccagatgtcatgagggaagcaggccttgtgagtggacactgaccatgagtccctggggggagtgatcccccaggcatcgtgtgccatgttgcacttctgcccaggcagcagggtgggtgggtaccatgggtgcccacccctccaccacatggggccccaaagcactgcaggccaagcagggcaaccccacacccttgacataaaagcatcttgaagcttttaaaaaaaaaaaaaaaaaaaaaaaaaa

SEQ ID NO: 6952 - DNA, 2298 bp, Homo Sapiens
  NM_199283
gcgggcggctgtgagcggcgctcggggcgcgctaggcggggagccgagccgggctggcggcaggcggacggggcgggcgcgtgcggcgcgagccgggcgctgaggacaagggccgctggtagggccggccggccggcgggcggagcgccgccgccgacgcacacgaggtgaccaggcattgatgcacccccaggaaggccacgcgctcaggaggcccccccgccccgctggctgctgctcacatggtgtctgggcccttggcactctgttcatgcgggagatggcaggggctggcacatgacagtggagcagaaatttggcctgttttctgctgagataaaggaagcagaccccctggctgcctcggaagcaagtcaacccaaaccctgtccccccgaagtgaccccccactacatctggatcgacttcctggtgcagcggtttgagatcgccaagtactgcagctctgaccaagtggagatcttctccagcctgctgcagcgctccatgtccctgaacatcggcagggccaaggggagcatgaaccggcacgtggcggccatcgggccccgcttcaagctgctgaccctggggctgtccctcctgcatgccgatgtggttccaaatgcaaccatccgcaatgtgcttcgcgagaagatctactccactgcctttgactacttcagctgtcccccaaagtttcctactcaaggagagaagcggctgcgtgaagacataagcatcatgattaaattttggaccgccatgttctcagataagaagtacctgaccgccagccagcttgttcccccagctgacatcggcgacctcctggagcagttagtagaggagaacacaggctccttgtcgggcccagcgaaggacttttaccagcgggagtttgatttctttaacaagatcaccaacgtgtcggctgtcatcaagccctaccctaaaggcgacgagagaaagaaggcttgtctgtcggccctgtctgaagtgacggtgcagccaggctgctccctgcccagcaaccccgaagccattgtgctggacgtcgactacaagtctgggaccccgatgcagagtgctgcaaaagccccatatctggccaagttcaaggtgaagcgatgtggagttagtgaacttgaaaaagaaggtctgcggtgccgctcagactctgaggatgagtgcagcacgcaggaggccgacggccagaagatctcctggcaggcagccatcttcaaactgggagacgactgccggcaggacatgctggccctgcagatcatcgacctcttcaagaacatcttccagctggtcggcctggacctctttgtttttccctaccgcgtggtggccactgcccctgggtgcggggtgatcgagtgcatccccgactgcacctcccgggaccagctgggccgccagacagacttcggcatgtacgactacttcacacgccagtacggggatgagtccactctggccttccagcaggcccgctacaacttcatccgaagcatggccgcctacagcctcctgctgttcctgctgcagatcaaggacagacacaacggcaacattatgctggacaagaagggccatatcatccacatcgactttggcttcatgtttgaaagctcgccgggcggcaatctcggctgggaacccgacatcaagctgacggatgagatggtgatgatcatggggggcaagatggaggccacacccttcaagtggttcatggagatgtgtgtccaggctacctggctgtgcggcacaggtttagccccaacatgactgagcgcgaggctgcaaatttcatcatgaaggtcatccagagctgcttcctcagcaacaggagccggacctacaacatgatccagtactatcagaatgacatcccctactgaggaggggaccttcgagggcctctgccccatgtgcccttgaagctgccccacaatcatggagccctgcgacctacccgccctgccgccacatgcagtggaggagaggcctgtggcccgaagagcctggtagcgcctcctggggcagcacgtgggtggcgcaggcttagtaacgccgtggactgcagcgacaatcagtggatggtgctgtctatgcacaggtgtgagtcctctgtttgcactggacatattccctacctgttttatttcataggtacatgaagtattgtgtataaaaaaagagataagatttaaccaacatcaacaaaataaaaacccaaaatagtgctgtgttggaaaaaaaaaaaaaaaaaaaaaaaaaaaa

SEQ ID NO: 6953 - DNA, 862 bp, Homo Sapiens
  NM_199297
gcgggggtcgcgctgcacagcctgcggcgcagcggaggcggaccgcagtcgagtctgcagagtgttgggtctgtagccagcaaattacttcatcatctagattatccattcagttgatcctaattagcaaggataacaagaatcgtccgcactaaagtcccctgcagcgtgaccatgtcgagaccccggaagaggctggctgggacttctggttcagacaagggactatcaggaaaacgcaccaaaactgagaactcaggtgaggcattagctaaagtggaggactccaaccctcagaagacttcagccactaaaaactgtttgaagaatctaagcagccactggctgatgaagtcagagccagagagccgcctagagaaaggtgtagatgtgaagttcagcattgaggatctcaaagcacagcccaaacagacaacatgctgggatggtgttcgtaactaccaggctcggaacttccttagagccatgaagctgggagaagaagccttcttctaccatagcaactgcaaagagccaggcatcgcaggactcatgaagatcgtgaaagaggcttacccagaccacacacagtttgagaaaaacaatccccattatgacccatctagcaaagaggacaaccctaagtggtccatgaagagtttgattttgttttgagcctggaggaaaaggaaccaagttaactgagatactgctgctggaatgggcgagacattgctgcaaagaagtcaagcttttttcagacaaaaggtgtgagggggcttgcttggtatgcttacctgggcttgtgtacctcagtggtttttgtgtacttttttcaataaaatatcaaagttgaagaaaa

SEQ ID NO: 6954 - DNA, 7065 bp, Homo Sapiens
  NM_199324
cccattgtaacgccggagtgggacgctgctttgcgtctgaaaggtgcaaattgaaactcgaaagcccgcaaattaacggggtgtctctctcctgatgaagaggtattgcactctcagtctcgccatgttgaagtcagaatggcctgtattcactatcttcgagagaacagagagaaatttgaagcgtttatagaaggatcatttgaagaatatttaaagcgtttggaaaatccacaggaatgggtaggacaagtggaaataagtgccctttctcttatgtacaggaaagattttataatttatcgggaaccaaatgtttctccttcacaagtaacagaaaataattttcctgaaaaggtgttactgtgtttttcaaatggaaatcattatgatattgtgtatcccataaagtataaagaaagctctgctatgtgtcagtctctcctttatgaattgctgtatgagaaggtatttaaaactgatgttagtaaaattgtgatggaactagacacgttggaagtagctgatgaagataacagtgaaatatcagattcagaggatgacagttgcaagagtaagactgctgctgctgctgctgatgtgaatggatttaaacctttgtcaggcaatgagctgaagaacaatgggaactctactagcctgcctttgtctagaaaggttcttaagtcactcaatcctgcagtctatagaaatgtggaatatgaaatttggctgaagtctaaacaagctcagcaaaaacgtgattattccattgctgctggcttacaatatgaagttggagacaaatgtcaagttaggttggatcacaatggaaaatttttgaatgcagatgttcaaggaattcattctgagaatggaccagttttggttgaagaactgggaaagaagcacacatcaaagaacctcaaggcacctcccccagaaagctggaacacagtgtcagggaagaagatgaaaaaaccttccacttctggacaaaatttccattctgatgtggattacagagggccaaagaatccaagcaagccaataaaagccccatcagcactacctcctcgactgcagcatccttcaggagtaagacaacatgcgttctctagtcattcttcagggtcacagtctcagaaattctccagtgagcacaaaaatcttagccggacaccttcacagatcataagaaaacctgatcgtgaaagagttgaggattttgatcacacaagtcgagaatctaactatttcggcctttccccagaagagcgcagagagaagcaagctatagaagaatcccgtttactctatgagattcagaacagagatgaacaggctttcccagccctttccagctcatcagtcaatcagtcagcttctcagagtagcaatccatgtgtccagagaaaatcatcacatgtaggtgatagaaaaggaagcaggcggagaatggatacagaagaacgaaaagacaaagactctattcatggacatagtcagttggataaaagacccgaaccaagcacattggagaatattactgatgataaatatgcaacagtttcatcaccatcaaagtcaaagaagttagagtgcccttctcctgcggaacaaaagccagcagaacatgtgtctttgtcaaatccagctccccttctagtttctccagaggtacatctaactcctgcggtgccttctttaccagccactgtgccagcctggccaagtgaacctacaacttttggaccaacaggtgtccctgctccaattcccgttttgtcagtgacacagactttgaccactggacctgattcagctgtatcccaagctcatttaacaccctctccagttcctgtgtcaatacaggcagttaaccagcccttgatgcctttgcctcagacattgagcctttatcaagacccactctatcctgggtttccttgtaatgaaaagggagatcgagccattgtaccaccttattcactgtgtcagactggggaggacctacctaaagataagaatattcttcgattcttcttcaatcttggtgtgaaggcatacagttgtcctatgtgggccccacattcttacctgtaccctctgcaccaggcctacctggcagcctgcaggatgtacccaaaggtccctgtccctgtttatcctcataatccctggttccaagaggctcctgctgctcagaatgaaagtgattgtacctgtactgatgcccactttcctatgcagactgaggccagtgttaatggtcaaatgccacagccagagattggaccgccgacattttcttcacctctggttatccctccatctcaggtgtctgaaagtcatggacaattgtcttaccaggctgatcttgaatctgagacccctgggcagcttctgcatgctgattatgaagagtcactaagtggcaagaatatgttcccccagccatcttttggacccaatccattcttaggcccagttcctattgcacctcctttctttcctcatgtttggtatgggtacccttttcagggattcatagaaaatccagtaatgaggcagaatattgtcctgccctctgatgaaaaaggagaattggatctgtctctggaaaatctggatctgtctaaagattgtggttcagtttcaacagtagatgagtttccagaagccaggggtgaacatgtacattctctccctgaagcaagtgtgagcagtaagccggacgaaggccggacagagcaatcttcccagacacgaaaggcagatacggcattggcttccatccctcctgtagcagagggaaaggctcatcctcccactcagattctaaacagagagagagaaactgtgcctgttgaacttgaacctaaaaggaccattcaaagcctgaaagaaaaaacagaaaaagtaaaagatcctaagactgctgctgatgtggtcagccctggggccaactctgttgatagcagagtgcaaagaccaaaagaagagagttcagaagatgaaaatgaagtgtctaatattttgagaagtggtagatccaagcagttctataatcaaacttatggaagcaggaagtacaaaagtgattggggctattctggtaggggtggatatcaacatgtgagaagtgaggagtcctggaaaggacagccaagcagaagtcgggatgaaggttatcagtaccatcgaaatgtcagagggcgaccatttaggggagataggaggagatcagggatgggagatggccataggggacagcacacttgatggttgttgccgaagtattttctaacagaaactcttaggtggaatgtttctgaaggctttaaaaaaaatacaataaagtaaaaaccgcagttggaactctttcctctccccagccccccttaccttcactcccatactggacaagacattttggacatgagttcaagggggcaggttaattcctggcattgccagttttcttcattcagaatctgtttgttgatcaagtgactgtccccgtaaaaagtagaagataagtttgttaaagtattttttataaacagcttaatataaaacattatagatttagtgtttggcttttttccttataagtttataagtttgatttcagatgttggaaatgtgtgctttatagtgtttactaaagtgacaagaaaatataccatttgacacactatagattccaaacataacgttgcaccaaatagaaatgtatattttattatgcaatgccttagtcataaactgggctcaaacaattctcagcctaaaacactgttgtcttttaaaatgcttccaacccaaaggcctttcatctcaatatctgtcaaacttgaataatgtcttctctttaatattcacataaggcagcctattaactgtgtcttagcaatgttgtatatagttcttttaatattcataaggtatatttttgaattttggtatttgttgagattgcatagaagaatagtaggaaatccaatgaaatggctgtttccaccaagaattcttagcactggtgtaaatatcatggtgcctactcgaaagaaatgtagatgctatgcattttgaaaataatctgcatcagttagaactgcagaagtttttttaatgccactttaacactaatgcactgacagattctaaatattttgtgagaagaaatgttaaaaatttttagcttgacaggtttctagagttgttttcttcctcccccccccccccgcaccattggttgtgtatcactttcactttacacttgcatgttctacttgtcagggctggaactattgtatagaagataatatgattgtgacttctagttcttttctagaggatgctgctagaaaatggttttgctttgtattttatagcttgttacccttaggtaggtaacatcttacattctgttttcttccagtctttgcagtattcactagaggttccctttgcatgttgcactctgttctcatttggagattgaactctgaattaacacagtattcattcatctgtgttattttgtaaaaataactgtagcttatattctttatttgtgcataccaatgtgaaaatccactcttttattatgttgagattatcttctgatcaggaagtttgagtgctatgcaaataacatagtagtaatttctctttgcatgccatgtgtaatatacctagccaaaaccagatgcggtgactttctttttttgtaaagcaaattacttaagaaaatacaattcacttgaatttgacaaactgaaacagatgggttttctgggttctctgataacctatgggaatgtttggatgccagttgggctagtgaatcgccactgtactgtaataatggttatttacctctgtgctgttttaattacctaacgtctgtgtaactgctgatttgagtagtgattagcatttagataatgtaacaggattttagagagcactttgaaagataacattttattatgatggtgctaggtaaaaaattgtaaagactgggatggttgtgtggaaaacttttcttgagagaacctattgaaaggaatttgttgtcaccttcttaactagaatagttgttgaaggtaccgcttaagccatttttttcttaacatcggtggctcagttaaggaatgagaagatagagggtcctccactttcagctcatgcttttttatgtaggactagcttacctgattttaatgaaaatcacattttgatacaaacaccagatttgaaagttcaatgtgtttgatctcaggagtccaaaataagttgttgcttctagtgtcctgcattttattgactggggtttgatctcagcttctgaaaatgtttaaaaattggaaggaaatactactcatatcttcattgtcactttgtcttacctcaattgagtaacagaatatagctcctgaaggaaacactgatttgctttctgtttcccatatctcacctctaggatatgatggaagaagtgcttgaaagagaattttagcagatggtacttttctcagtgacctctggaataaaagaactgacttttgatagttttaaaattaatctttgcatgaaggttggtttcgctttttttcctttaagtttgtttttaaatgtattagtccaggggattttgccttatgctgaggtcaaactaaggataagcaagcttttgtccttcattttaactgttatgtcatactgttatgttgacatatttctttataagagaatagaggcaaaagtatagaactgaggatcatttgtatttttgagttggaaattatgaaacttcaccatattatgatcatacatattttgaagaacagactgaccaaagctcacctgttttttgtgttaggtgctttggctgaacttgattccagcccccttttccctttggtgttgtgtatgtctcttcatttcctctcaaatcttcaactcttgccccatgtctccttggcagcaggatgctggcatctgtgtagtcctcatactgtttactgataacccacaaattcattttcatggcagacctaagctcagaccctgccttgtcctggcaagcataggttttcccagaccacaatgctgatatatcttatttaatgcagactgtattcttgcagcgtgttgtttcctttgtgactcaaggttgaattaaaatgcctgtgaactgcaaacttgcttatgattgacttggtgcaataaagttcctttctaaccatttctggtttagaaaacattcagccatcctagaaactagcaatatttatttttgcctctttcgttttaccttcatttttagatgaggtaaatgttttgtcttttacttaagggtactaagcaaggtccactctagtgtagctgaagagaatgcatatttggctacactatttctgtttactgtattttgcttcctactttatgtctaaatgctattgtttgtttaaaatcctaataatgtctcatttccaatatgttattttcagataactaaggttttgctactaatgtcagccatttactctcccactaattgggattattttttaaaagaggtctttctccccgaaatacaagttttagaaaatcttagaagaggggtgggtgcatgtcttaatgctgggaagcggcaactttggggttgaacttacttgaatggattaaaaattgcattgtgttacagagctagaaaattttatgtatgaaaaacgataatagccttacactgagtacaaataatactttaagagcatgtgaagatgtgatcatttgtgatgttacttgtaaaaaaaagtatatatacatatcttttgaagtgttaaaaggaaactagtactttatattctttatcatatcactttttgtaagtgttgaatatattcctgtttatttttctatgttctgttttgtagccttaagaagtgtttcaaacatatctgaatgtataaaataagagtaaatgccctacatggtgtgatgctgcattatatataaaactgtgtgcatatattaaattttgtctcttga

SEQ ID NO: 6955 - DNA, 1244 bp, Homo Sapiens
  NM_199326
agccattgcccctgcgaggaccccggtccctctcctcatcgttgcctgacgtgagctttttgtgccccgacagcgagtggttgtcaccccaggccctggcgaggggggcacgtgtctctgtcacgtgaatccctagtgggggggggtggcacaagactgtcacgcgaagtctgaggaagggggtggcccaggccccaggtcgggggttcttgtcgggcgctgggcctgagtgagcagtaacgaaggtgcactcctgaccctgcctggatctggggaaaaccctctggccacggggcctccacctcctccccggagaggcaggaggaggggcaggaggggggcaggaggagggccgggcccggggggctcccctcaccgaggcgcgtggacaggggctccgttcctgtgaagctctccctgacatgcatcttcgtctctccatcctggctttcgatctagaggcagaaaagtgcagaaggaagggaagatcagctatgccgactttgtctggtttttgatctctgaggaagacaaaaaaacaccgaccagcatcgagtactggttccgctgcatggacctggacggggacggcgccctgtccatgttcgagctcgagtacttctacgaggagcagtgccgaaggctggacagcatggccatcgaggccctgcccttccaggactgcctctgccagatgctggacctggtcaagccgaggactgaagggaagatcacgctgcaggacctgaagcgctgcaagctggctaacgtcttcttcgacaccttcttcaacatcgagaagtacctcgaccacgagcagaaagagcagatctccctgctcagggacggtgacagcggcggccccgagctctcggactgggagaagtacgcggccgaggagtacgacatcctggtggccgaggagactgcgggagagccctgggaggacgggttcgaggccgagctcagccctgtggagcagaagctgagtgcgctgcgctccccgctggcccagaggcccttcttcgaggcgccctcaccgctgggcgccgtggacctgtacgagtacgcatgcggggacgaggacctggagccgctgtgacgccgcccgcgagaacgccgccgcggggccgctccccacgtgccaccaccgggccaccgcggctcgtgtaaaaactgttgtggaaaatgagtgcgtttgtacggaatgataaacttttatttattcacagaaaaaaaaaaaa

SEQ ID NO: 6956 - DNA, 1286 bp, Homo Sapiens
  NM_199336
gcggcagtgacttcgccgctgctgtagttccccggctggatgcggtgactggtgccagtgctcaggcgcccgctgcccttgacctcccgccccgcgagccctaactcagcgcaggaggaccggctgccgccgccgccgccgccaggctctgatgctggtgtctggtagaagaagattactcacagctctgctgcaggctcagaagtggccctttcaaccctccagagacatgagactagtgcagttccgggcaccccacctggtggggcctcacttgggcctggagacagggaatggtggaggggttatcaacctcaatgcctttgaccccacactcccaaagacgatgacgcagttcctagagcagggagaggccaccctctcagtggcaagaagagccttggctgcccagttgccagtcctaccatggtcggaggtaaccttcctggctccagtcacatggccagataaggtggtgtgtgtgggcatgaattatgtggaccactgcaaagaacagaacgtgcccgtgcccaaggagcccatcatcttcagcaagtttgccagctccatcgtggggccctatgatgaggtggtcctcccaccacagagccaggaggtagattgggaagtggagctggccgtggtcattggaaagaaaggcaagcacatcaaggccacagatgccatggcccacgtggccggcttcactgtggctcatgacgtgagtgctcgtgactggctaacaagacgcaatgggaaacagtggctgctgggaaaaaccttcgacaccttctgccctctgggccctgccttggtgaccaaggacagtgtagcagatccacacaacttaaagatctgctgccgagtgaatggggaagtcgtccagagcagcaacaccaaccagatggtattcaagacagaggacctgatagcctgggtctcccagtttgttaccttttacccaggggatgtcatcctaactgggacccccccaggtgtcggtgtattcaggaaacctcctgtctttctcaagaagggggatgaagtccagtgtgagattgaagaactaggtgtcatcatcaacaaggtggtgtgatggctcctgcacaggcccgacataggatgagggcatctgctcccactcagcctagcccagggaaaggcccagtggcaggtgtgggcaggtgccagccctgcaagccgcctcttctcggtagaagggagaaggacagagctctcttcaataaatgcgtcgggtcaaagcaaaaaaaaaaaaaaaaaaaaaa

SEQ ID NO: 6957 - DNA, 1060 bp, Homo Sapiens
  NM_199337
gcagcggcgcttcctggtggtcagggcgccatggcgctgtcctggctgcagcgcgtcgagcttgcgctctttgctgccgccttcctgtgcggggccgtggcggccgcggcgatgactcggacccagggctccttcagtggtagatgtcccctgtatggtgtggccaccctgaatggctcctccctggccttatcccgtccctcagcaccatccctgtgctactttgtagctggggcctctggcctcttggccctctactgcctcctgcttttgctcttctggatctacagcagctgcatcgaggactcccacagaggtgctatagggctgcgcattgcactggccatctcagctatagccgtcttcctggtcttggtgtctgcctgtatccttcgatttggcaccaggtctctctgcaactccatcatctccttgaacactacaattagctgttctgaagcccagaaaattccatggacaccccctggaactgctctgcagttttactccaacctacacaatgctgaaacctcttcttgggtgaatttggtattgtggtgtgtggtcttggtgctccaggtcgtgcagtggaagtctgaagccaccccataccggcctctggagaggggtgaccctgagtggagctctgagacagatgctctcgttgggtcacgcctttcccattcctgaagaataagcggagtgcttcctgcagccgaagactccatgcccaagtgcctgtaatcccccccctcaaggccctgtttatgttgggagtcttagttttcctttcgttggggggtgggggggaaacataatgacaggcccccctccacctcttcctgcagctgtttttgtaccaaaatattatattactgtcttcatcttagtagtgagtttttgatgttaaagtacaactagataggaggaaggagtgaaggctaagcagacatggactgaaacttagaggtactgttaggcagctgccctagggatgactgctcctttatttgttgttaatgaatcttgacctccttgtgtgaaaaaaaaaaaaaaaaaa

SEQ ID NO: 6958 - DNA, 2278 bp, Homo Sapiens
  NM_199341
ggacgccgctccggggcgggtaggcccccaggatggagcggccggagcccccacccggcacggctgcggggcaggaggagcaggagctgcgggagcgggccttcttctcgtgggccgagttcagccgcttcttcgacgcgtggtgccagcagcggctggcgctcttcttcgtcaagagctccatgcacctggcgcgctgccgctgggccagtgcgcccccgctctacacgctcatcgacgtgctcaagtacagctacgtgcggcttgtgtgcaaggacgtgcgtgcgcccagccggcccgccgtggggcctccccagcccggctgccccgccttcatcatcgtcaagctgagcccgctgcgggaccgcctcgtggtgacggagtgccagctgacccactcacacccggcctgcccgctggagttcgcctactacttccgcccgggccacctgctggccaacgcctgcctgccggtgcgcaccaccaacaagatctccaagcagttcgtggccccagccgacgtgcgccgcctgctgtcctactgcaagggccgcgaccacggcgtcctggacgccctgcacgtgctcgagggcctcttccgcaccgaccccgaggccaaggtgaagctggtgttcgtggaggaccaggctgtggtggagacggtgttcttcctgacgtcgcgcaccagggcgctgctgcggcgcttccctcgcatgctgctggtggaccggctgccggggctgcagggcgcgctggatctgctggccgtgctgtgcgtggacggctcgggccgtgcgcgccaggctgcctgctgcgtggcgcgcccgggcacaccgagcctgctgcgcttcgcgctcgcgtcgctgctgcagagcgcgccagacgtcaagggccgcgtgcgctgcctcaccgccgggcccgaggtggcggcgcagttgcctgcagtgcgccagctgctgccctgcgcgcgcgtgcagatctgccgcgcgcagggcctggagacgctcttcagcaaggcgcaggagctgggcggcgccggccgcgaggacccgggcctgtggtcgcgcctgtgccgcctggctggcgcgtcgtcgcccgcagcctacgacgaggcgctggccgagctccacgcccacggcccagccgccttcgtggactacttcgagcgcaactgggagccccgccgcgacatgtgggtccgcttccgcgccttcgaggcggccagagacctggacgcgtgtgccctggtgcgaggccaccgccggcgactgctgcgtcgtctcagcccctcgcgtggcgtggcgcagtgccttcgcgacctggtggccatgcagtgggccgacgcggccggggaggcggtgcccgaggggcccgatggcggggggccttggctggaggatgagccagggaggggagcccagggggagaacgagagggtgaggggcctggagacaggcgactggggaggggctccgaaagaaggaagtatttggaggggagcccagatggagaaggagtgggcaagggcactggaaaccagagactggggcggggctcagttcgaaggtgagaaggggagggcactgcagatcagagattggagagggggtcggttggagaatcagaagccgaggggactggaagggggtgtcttgagagggtcgaagttagagaaagggcacctgagagggccagagattagagactggagggggccccagttggagggtgagaaagattggggactggaaggttatgtctggagggggtcccagttggaggaccaggcgctaagaggattggaagggtatacctggagggtggcccagctggaagatcgcaggagtaccaccgacctgagggggacccagtttgactatgagagggggaaagggagaaagtacagaagacagatgaaggagaggaggtaagcgagaaaaaatggaaaggggagccggaaatggaggagagaggacaagcaaagagacagaaatgaagacatgaggaaaagctgggggaagcaggagaggaagggacgggatgtaggagggggaagaaaaatcggagatgagacaaaagaaatgtgtgggagacgggtagagacgaaatgcaaggggcgtggttttggtttttctccaagacctggagacatcgacccccatcgccttctgaagagagagggagggcgggcactgggggtcaggagagtctccagcaggggaggggaattgtttggactattgttcttcaggattggaataaaacaatcttattttgg

SEQ ID NO: 6959 - DNA, 2491 bp, Homo Sapiens
  NM_199345
caagatggcgctgggcgggcggctgtgagcggcgctcggggcgcgctaggcggggagccgagccgggctggcggcaggcggacggggcgggcgcgtgcggcgcgagccgggcgctgaggacaagggccgctggtagggccggccggccggcgggcggagcgccgccgccgacgcacacgaggtgaccaggcattgatgcacccccaggaaggccacgcgctcaggaggcccccccgccccgctggctgctgctcacatggtgtctgggcccttggcactctgaggagctaacattccttctgtacctgtagttcatgcgggagatggcaggggctggcacatgacagtggagcagaaatttggcctgttttctgctgagataaaggaagcagaccccctggctgcctcggaagcaagtcaacccaaaccctgtccccccgaagtgaccccccactacatctggatcgacttcctggtgcagcggtttgagatcgccaagtactgcagctctgaccaagtggagatcttctccagcctgctgcagcgctccatgtccctgaacatcggcagggccaaggggagcatgaaccggcacgtggcggccatcgggccccgcttcaagctgctgaccctggggctgtccctcctgcatgccgatgtggttccaaatgcaaccatccgcaatgtgcttcgcgagaagatctactccactgcctttgactacttcagctgtcccccaaagtttcctactcaaggagagaagcggctgcgtgaagacataagcatcatgattaaattttggaccgccatgttctcagataagaagtacctgaccgccagccagcttgttcccccagctgacatcggcgacctcctggagcagttagtagaggagaacacaggctccttgtcgggcccagcgaaggacttttaccagcgggagtttgatttctttaacaagatcaccaacgtgtcggctgtcatcaagccctaccctaaaggcgacgagagaaagaaggcttgtctgtcggccctgtctgaagtgacggtgcagccaggctgctccctgcccagcaaccccgaagccattgtgctggacgtcgactacaagtctgggaccccgatgcagagtgctgcaaaagccccatatctggccaagttcaaggtgaagcgatgtggagttagtgaacttgaaaaagaaggtctgcggtgccgctcagactctgaggatgagtgcagcacgcaggaggccgacggccagaagatctcctggcaggcagccatcttcaaactgggagacgactgccggcagaagagctactggggtgcaaggacgccaactgaccgcatcctgcgcctcccggcttcccaggacatgctggccctgcagatcatcgacctcttcaagaacatcttccagctggtcggcctggacctctttgtttttccctaccgcgtggtggccactgcccctgggtgcggggtgatcgagtgcatccccgactgcacctcccgggaccagctgggccgccagacagacttcggcatgtacgactacttcacacgccagtacggggatgagtccactctggccttccagcaggcccgctacaacttcatccgaagcatggccgcctacagcctcctgctgttcctgctgcagatcaaggacagacacaacggcaacattatgctggacaagaagggccatatcatccacatcgactttggcttcatgtttgaaagctcgccgggcggcaatctcggctgggaacccgacatcaagctgacggatgagatggtgatgatcatggggggcaagatggaggccacacccttcaagtggttcatggagatgtgtgtccaggctacctggctgtgcggtgagcctgggccctacatggatgtggtcgtctccctggtcactatcatgttggacacgggcctgccctgttttcgcggccagacaatcaagctcttgaagcacaggtttagccccaacatgactgagcgcgaggctgcaaatttcatcatgaaggtcatccagagctgcttcctcagcaacaggagccggacctacaacatgatccagtactatcagaatgacatcccctactgaggaggggaccttcgagggcctctgccccatgtgcccttgaagctgccccacaatcatggagccctgcgacctacccgccctgccgccacatgcagtggaggagaggcctgtggcccgaagagcctggtagcgcctcctggggcagcacgtgggtggcgcaggcttagtaacgccgtggactgcagcgacaatcagtggatggtgctgtctatgcacaggtgtgagtcctctgtttgcactggacatattccctacctgttttatttcataggtacatgaagtattgtgtataaaaaaagagataagatttaaccaacatcaacaaaataaaaacccaaaatagtgctgtgttggaaaaaaaaaaaaaaaaaa

SEQ ID NO: 6960 - DNA, 2486 bp, Homo Sapiens
  NM_199357
gaaactgcgggtgtgacccccccgtggtggctctgggtgtctgcggaggagctgggggcggaagcatgaggctaacggcttggcttcagtgaacgcaccgggatgtgcaggccgggaggtagaggcaggctgatgggggagggaacgagcagcctgtgagacggggtgacggcggctaccagcccgggcgggcaccgggactggaagagttgcctgagcagccggctggtccggcggccaggctagggcgggggcgagcgcccagttgagcctgctggggctggaggagcgagaagggttttcttcacatttcagagcgaaccagacggggacagtaaggtttggaggaagggggatcgttggaagtagcaagaagtggagagaatctggcaatagacgagaaaccgaaagaatcagaaagaagtctatgtgagtagctgaaagcattgggtgaccagaaagaaggtcggtgtaagtgaaggaagagtgaggtgtggctggatcaaagggctaagagaagcgggtctgtgtaagtggatgtgagtgaggatcaaggaaaagccgtggaagtggccgggggtcggggccgcagaagtgccagacggggccggaaagcagccgagcggagttcaaatttgagagcgtttggaaattggaagacttggtggcgaacgagggtcaggacctgcatcctgcctcagagagttatcgacgtatccggaatgtgggatcagaggctggtgaggttggccctgttgcagcatctgcgggccttctatggtattaaggtgaagggtgtccgtgggcagtgcgatcgcaggagacatgaaacagcagccacggaaatagggggtaaaatatttggagtaccttttaatgcactgccccattctgctgtaccagaatatggacacattccaagctttcttgtcgatgcttgcacatctttagaagaccatattcataccgaagggctttttcggaaatcaggatctgtgattcgcctaaaagcactaaagaataaagtggatcatggtgaaggttgcctatcttctgcacctccttgtgatattgcgggacttcttaagcagttttttagggaactgccagagcccattctcccagctgatttgcatgaagcacttttgaaagctcaacagttaggcacagaggaaaagaataaagctacactgttgctctcctgtcttctggctgaccacacagttcatgtattaagatacttctttaactttctcaggaatgtttctcttagatccagtgagaataagatggacagcagcaatcttgcagtaatatttgcaccgaatcttcttcagacaagtgaaggacatgaaaagatgtcttctaacacagaaaagaagctacgattacaggctgcagtagtacagactcttatcgattatgcatcagatattgggcgtgtaccagattttatcctggaaaagataccagccatgttgggtattgatggtctctgtgctactccatcactggaaggctttgaagaaggtgaatatgaaactcctggtgaatataagagaaagagaagacaaagtgtaggagattttgttagtggagcactaaataaatttaaacctaacagaacaccttctattacacctcaagaagaaagaattgcccagctatctgaatcaccagtgattcttacaccaaatgctaagcgtacattgccagtagattcttctcatggtttctcaagtaagaaaaggaagtccatcaagcacaattttaactttgagctgttgccaagtaatctcttcaatagcagttctacaccggtatcagttcacatcgatacaagctcagaagggtcatctcagagttcactctctcctgtactcattggtggaaaccatttgatcactgcaggtgtgccaaggcgaagtaaaagaattgcaggcaaaaaagtttgcagagtggaatcaggaaaagcaggctgcttttctcctaaaatcagccataaagaaaaggttcgaagatctctgcgtttgaaattcaatctagggaaaaatggcagagaagtaaatggatgttctggtgtcaatagatatgaaagtgttggttggcgacttgcaaatcaacaaagtttaaaaaatcgaattgaatctgtaaaaacaggtttgctttttagcccagatgttgatgaaaagttaccaaagaaaggtacatttacatactactgttagagttttacctaaaaatcctgctttagttgcttttttaatggcaaaacatattaattaatttactgttctagagattaaaagttcatgtttgaatagtgaaaatattagaattggcaatgtatttttctatcaacaattgggaaatgcttatacatgtaaatatgaaaatgtttgacattcttatgttaaaaattatttcttgtaacacaaatactttattagaattaaatgcttagtgacttaaaaaaaaaaaaaaaa

SEQ ID NO: 6961 - DNA, 2319 bp, Homo Sapiens
  NM_199367
aggcgcggctttcaggccaacatggccgtgctgctgctgctgctccgtgccctccgccggggtccaggcccgggtcctcggccgctgtggggcccaggcccggcctggagtccagggttccccgccaggcccgggagggggcggccgtacatggccagcaggcctccgggggacctcgccgaggctggaggccgagctctgcagagcttacaattgagactgctaacccctacctttgaagggatcaacggattgttgttgaaacaacatttagttcagaatccagtcagactctggcaacttttaggtggtactttctattttaacacctcaaggttgaagcagaagaataaggagaaggataagtcgaaggggaaggcgcctgaagaggacgaagaggagaggagacgccgtgagcgggacgaccagatgtaccgagagcggctgcgcaccttgctggtcatcgcggttgtcatgagcctcctgaatgctctcagcaccagcggaggcagcatttcctggaacgactttgtccacgagatgctggccaagggcgaggtgcagcgcgtccaggtggtgcctgagagcgacgtggtggaagtctacctgcaccctggagccgtggtgtttgggcggcctcggctagccttgatgtaccgaatgcaggttgcaaatattgacaagtttgaagagaagcttcgagcagctgaagatgagctgaatatcgaggccaaggacaggatcccagtttcctacaagcgaacaggattctttggaaatgccctgtactctgtggggatgacggcagtgggcctggccatcctgtggtatgttttccgtctggccgggatgactggaagggaaggtggattcagtgcttttaatcagcttaaaatggctcgtttcaccattgtggatgggaagatggggaaaggagtcagcttcaaagacgtggcaggaatgcacgaagccaaactggaagtccgcgagtttgtggattatctgaagagcccagaacgcttcctccagcttggcgccaaggtcccaaagggcgcactgctgctcggcccccccggctgtgggaagacgctgctggccaaggcggtggccacggaggctcaggtgcccttcctggcgatggccggcccagagttcgtggaggtcattggaggcctcggcgctgcccgtgtgcggagcctctttaaggaagcccgagcccgggccccctgcatcgtctacatcgatgagatcgacgcggtgggcaagaagcgctccaccaccatgtccggcttctccaacacggaggaggagcagacgctcaaccagcttctggtagaaatggatggtgcctctcttgaccagctaccctcccaggggaccatgaggaagctcagaggaaagacccccgcctgctcctgtctcacggagcccacagggtcacggagggcaatggagggtcattcgctctgctggggttgccttttgcactgaagatagagaccacctttttgagtgacttgagcccaaaggcaagcgtatatcaaacgatcttctccacataacctctctgtgccatcataagaatagctgcttccgcccccggatttgctcaggcctgggaatccgctgactgaaggcctcttgttgagtgccagctctaaacaagtccctttatgcagagccacagctgtgcatgctcagccctgccgaggtcccaggccaggctttgttgcttccgttcatggaagcgcacaggatagggccgacgctgtgccggtcgtggggaaatctcactggggaagagaaaagcccaagccttgttggttacgtcagccggtccatggcggtgtcctgcggaccccagagcccccgggaagggcgcaagtcaaagagcactggaggcaccgccggcgatggacgtccaggtcccggctcctgtgctggaaagcgttgatggggagcgtcggcgctgaccacacgcgggagctgcggaagcccagcggttcacacaggcctcccttcaacgtagtcatcccctggtggtggaagcaagacgacggcccctgacgtgcagccacacacagaaaaggctgctgtgaacattttatgcttcgactttttttttcttcagagacagggtgtcgttctgtcgcccaggctggagtgcagtgccaccatcatagctcactgcagcctccacctcctaggctcaagcttcctaagtagttgggactcaaggcttgagtcaccatgccaggctctgttttttcagtctgtgaaaaataaagtcatcagcatgtgaaaaaaaaaaaaaaaaaa

SEQ ID NO: 6962 - DNA, 3091 bp, Homo Sapiens
  NM_199413
gcttcgccccgtggcgcggtttgaaattttgcggggctcaacggctcgcggagcggctacgcggagtgacatcgccggtgtttgcgggtggttgttgctctcggggccgtgtggagtaggtctggacctggactcacggctgcttggagcgtccgccatgaggagaagtgaggtgctggcggaggagtccatagtatgtctgcagaaagccctaaatcaccttcgggaaatatgggagctaattgggattccagaggaccagcggttacaaagaactgaggtggtaaagaagcatatcaaggaactcctggatatgatgattgctgaagaggaaagcctgaaggaaagactcatcaaaagcatatccgtctgtcagaaagagctgaacactctgtgcagcgagttacatgttgagccatttcaggaagaaggagagacgaccatcttgcaactagaaaaagatttgcgcacccaagtggaattgatgcgaaaacagaaaaaggagagaaaacaggaactgaagctacttcaagagcaagatcaagaactgtgcgaaattctttgtatgccccactatgatattgacagtgcctcagtgcccagcttagaagagctgaaccagttcaggcaacatgtgacaactttgagggaaacaaaggcttctaggcgtgaggagtttgtcagtataaagagacagatcatactgtgtatggaagaattagaccacaccccagacacaagctttgaaagagatgtggtgtgtgaagacgaagatgccttttgtttgtctttggagaatattgcaacactacaaaagttgctacggcagctggaaatgcagaaatcacaaaatgaagcagtgtgtgaggggctgcgtactcaaatccgagagctctgggacaggttgcaaatacctgaagaagaaagagaagctgtggccaccattatgtctgggtcaaaggccaaggtccggaaagcgctgcaattagaagtggatcggttggaagaactgaaaatgcaaaacatgaagaaagtgattgaggcaattcgagtggagctggttcagtactgggaccagtgcttttatagccaggagcagagacaagcttttgcccctttctgtgctgaggactacacagaaagtctgctccagctccacgatgctgagattgtgcggttaaaaaactactatgaagttcacaaggaactctttgaaggtgtccagaagtgggaagaaacctggaggcttttcttagagtttgagagaaaagcttcagatccaaatcgatttacaaaccgaggaggaaatcttctaaaagaagaaaaacaacgagccaagctccagaaaatgctgcccaagctggaagaagagttgaaggcacgaattgaattgtgggaacaggaacattcaaaggcatttatggtgaatgggcagaaattcatggagtatgtggcagaacaatgggagatgcatcgattggagaaagagagagccaagcaggaaagacaactgaagaacaaaaaacagacagagacagagatgctgtatggcagcgctcctcgaacacctagcaagcggcgaggactggctcccaatacaccgggcaaagcacgtaagctgaacactaccaccatgtccaatgctacggccaatagtagcattcggcctatctttggagggacagtctaccactcccccgtgtctcgacttcctccttctggcagcaagccagtcgctgcttccacctgttcagggaagaaaacaccccgtactggcaggcatggagccaacaaggagaacctggagctcaacggcagcatcctgagtggtgggtaccctggctcggcccccctccagcgcaacttcagcattaattctgttgccagcacctattctgagtttgcgcgagaactttcaaaggcttccaaatctgatgctacttctggaatcctcaattcaaccaacatccagtcctgagaagccctgatcagtcaaccagctgtggcttcctgtgcctagactggacctaattatatgggggtgactttagtttttcttcagcttaggcgtgcttgaaaccttggccaggttccatgaccatgggcctaacttaaagatgtgaatgagtgttacagttgaaagcccatcataggtttagtggtcctaggagacttggttttgacttatatacatgaaaagtttatggcaagaagtgcaaattttagcatatggggcctgacttctctaccacataattctacttgctgaagcatgatcaaagcttgttttatttcaccactgtaggaaaatgattgactatgcccatccctgggggtaattttggcatgtatacctgtaactagtaattaacatcttttttgtttaggcatgttcaattaatgctgtagctatcatagctttgctcttacctgaagccttgtccccaccacacaggacagccttcctcctgaagagaatgtctttgtgtgtccgaagttgagatggcctgccctactgccaaagaggtgacaggaaggctgggagcagctttgttaaattgtgttcagttctgttacacagtgcattgccctttgttgggggtatgcatgtatgaacacacatgcttgtcggaacgctttctcggcgtttgtcccttggctctcatctcccccattcctgtgcctactttgcctgagttcttctacccccgcagttgccagccacattgggagtctgtttgttccaatgggttgagctgtctttgtcgtggagatctggaactttgcacatgtcactactggggaggtgttcctgctctagcttccacgatgaggcgccctctttacctatcctctcaatcactactcttcttgaagcactattatttattcttccgctgtctgcctgcagcagtactactgtcaacatagtgtaaatggttctcaaaagcttaccagtgtggacttggtgttagccacgctgtttactcatacagtacgtgtcctgtttttaaaatatacaattattcttaaaaataaattaaaatctgtatacttacatttcaaaaagaaaaaaaaaaaaaaaaaaaaa

SEQ ID NO: 6963 - DNA, 2224 bp, Homo Sapiens
  NM_199418
ggaggagctgttttgcggcgggcggagctgcaggctgggcagggcttagcctgtgcgcttctgctggcctccttttcgccctcccacccgcactgcagtctccagcctgagccatgggccgccgagccctcctgctcctgcttctgtcttttctggcgccctgggccaccatagccctccggccggccttaagggccctcggcagcctacacttgccaaccaaccccacatccctcccggctgtagccaagaactattcggttctctacttccaacagaaggcccttgctgctgggcagttgcacatatgtattatccaactaaatcattacaagactcctctggttgatcattttggatttaatactgtgaaaacttttaatcagcggtacctagtagctgataaatactggaagaaaaatggtggatcaatacttttctacactggtaatgaaggggacattatctggttttgtaataacacggggttcatgtgggatgtggctgaggaactgaaagctatgttggtgtttgctgaacatcgatactatggagagtctctcccctttggtgacaactcattcaaggattccagacacttgaatttcctgacatcagaacaagctctggctgattttgcagagttaatcaaacacttgaaaagaacaatcccaggagctgaaaatcaacctgtcattgccataggaggctcctatggtggcatgcttgccgcctggtttaggatgaaatatcctcatatggtagttggagctcttgcagcttctgcccctatctggcagtttgaggatttagtaccttgtggtgtatttatgaagatcgtaactacagattttaggaaaagcggtccacattgttcagagagcatccacaggtcctgggatgccattaatcgactctcaaatactggcagtggtttgcagtggcttactggagcccttcacttatgcagcccattaacttctcaggacatccaacatttgaaagactggatctctgaaacctgggtgaatctggcaatggtggactatccttatgcctctaactttttacagcctttgcctgcttggcctatcaaggtagtgtgccagtatttgaaaaatcccaatgtatctgattcactgctgctgcagaatattttccaagctctgaatgtatattacaattattcgggccaggtgaaatgcctgaatatttcagagacagcaactagcagtctgggaacactgggttggagctatcaggcctgcacagaagtagtcatgcccttttgtactaatggtgtcgatgacatgtttgaacctcactcatggaacttaaaggaactttctgatgactgttttcaacagtggggtgtgagaccaaggccctcctggatcactactatgtatggaggcaaaaacattagttcacacacaaacattgttttcagcaatggtgaactagacccctggtcaggaggtggagtaactaaggatatcacagacactctggttgcagtcaccatctcagagggggcccaccacttagatctccgcaccaagaatgccttggatcctatgtctgtgctgttagcccgctccttggaagttagacatatgaagaattggatcagagatttctatgacagtgcgggaaagcagcactgagaaacttttgattgttttcaatttcttcttttatgttcacaccaccacattcccattcactttgattttctacatgtaattaccttcttttgtttatcattagatttgatggggccaaagttgagatagaatagagggtgatgacggtaagagcaagtgtcccatgaatgtgatttcctgggttctcactgtctttgcaccacgtctaggaagaatcttcttgatagctctcccacaccatcagtggccctcataactggagtagagttcctggttgcttttcataagagggagagttactttctttgtatctctgcaagcagagatttctctttggttttgaggttgaagtgtctttggcccatttgtaagtccccatccctaccctacacaaagtaaaagcagaagatagataaaaaatgatgtaattgcagctggtaggatgtctggtgccaatccaggaagtgagagccatttcttttgtaccggatttaatgactttgaactgtgctgtaaataaataatacagctggaccttaaaaaaaaaaaaaaaaaaa

SEQ ID NO: 6964 - DNA, 8787 bp, Homo Sapiens
  NM_199420
gggcgggccgggaggtttgagtttgaagactggcgggaagatgtccgcagctgttgccaggccagggttctcccgagagggaggacgctgggactgtggcttgccctgatcggccgagaagagtttgccatgaatcttctgcgtcggagtgggaaacggcggcgttcagaatcaggctcagattcgttctcgggaagcggcggtgacagcagtgccagcccccagttcctctccgggtccgtgctgagcccgccgcccggccttggtcgctgcctgaaggccgcagctgcaggagaatgcaagcctacagttcctgactacgaaagagacaagctactattggcaaactggggacttcctaaagcagttctggaaaaataccacagttttggtgtaaaaaagatgtttgaatggcaggcagagtgccttttgcttggacaagtcctggaaggaaagaatttagtttattcagctcctacaagtgctgggaagactcttgtggcagaattacttattttgaagcgggttttggaaatgcggaagaaagctttgtttattcttccctttgtttctgtggctaaagagaagaaatactacctccagagtctgtttcaggaagtaggaataaaagtagacggttatatgggcagcacctctccatcaaggcatttctcttcattggatattgcagtctgcacaattgagagagccaatggtctgatcaatcgcctcatagaggaaaataagatggatctgttaggaatggtggttgtggatgaattacatatgctgggagactctcaccgagggtatctgctggaacttttgctgaccaagatttgctatattactcggaaatcagcatcttgtcaggcagatctagccagttctctgtctaatgctgtgcaaatcgttggcatgagtgctacccttcctaatttggagcttgtggcttcctggttgaatgctgaactctaccataccgactttcgccctgtaccgcttttggagtcagtaaaagttggaaattccatatatgactcttcaatgaaacttgtgagggaatttgagcccatgctacaagtgaagggagatgaggaccatgttgttagtttatgttatgagacgatttgtgataaccattcagtattacttttttgtccatcaaagaaatggtgtgagaagctggcagatatcattgctcgagagttttataatctacatcatcaagctgagggattggtgaaaccctctgaatgcccaccagtaattctggaacaaaaagaactcctggaagtgatggatcagttaagacgtttgccttcaggactggactctgtattacagaaaactgtaccatggggagtagcatttcatcatgcaggtcttacttttgaggagagggatatcattgaaggagcctttcgtcaaggtctcattcgggtcttggcggcaacttctactctttcttctggggtgaatttacctgcacgtcgtgtgattattcgaacccctatttttggtggtcgacctctagatattcttacttataagcagatggttggccgtgctggcaggaaaggagtggacacagtaggcgagagtatcttaatttgtaagaactctgagaaatcaaaaggcatagctctccttcagggttctctaaagcctgttcgcagctgtctgcaaagacgagaaggagaagaagtaactggcagcatgatacgagctattctggagataatagttggtggagtggcaagtacatcacaagatatgcatacttatgctgcctgcacatttttggctgcaagtatgaaagaagggaagcaaggaattcagagaaatcaagagtctgttcagcttggagcgattgaggcctgtgtgatgtggctactagaaaatgaattcatccagagtacagaagccagtgatggaacagaaggaaaggtgtatcatccaacacatcttggttcggccactctttcttcttcactttctccagctgatactttagatatttttgctgacctgcaaagagcaatgaagggctttgttttagagaatgatcttcatattctctatctggttacacctatgtttgaggattggactactattgattggtatcgatttttctgtttatgggagaagttgccaacttcaatgaaaagggtggcagagctagtgggagttgaagaggggttcttggcccgttgtgtgaaaggaaaagtagtagccagaactgagagacagcatcgacaaatggccatccataaaaggtttttcaccagtcttgtgctattagatttaatcagtgaagttcccttaagggaaataaatcagaaatatggatgcaatcgtgggcagattcaatctttgcaacagtcagctgctgtttatgcagggatgattacagtattttccaaccgtctgggctggcacaacatggaactactactttcccaatttcagaagcgtcttacgtttggcatccagagggagctgtgtgacctggttcgggtatccttactaaatgctcagagagccagggttctctatgcttctggctttcatactgtggcagaccttgctagagcaaatattgtggaggtggaggtgattctgaaaaatgctgtgcctttcaaaagtgcccggaaggcagtggatgaggaagaggaagcagttgaagaacgtcgcaatatgcgaactatctgggtgactggcagaaaaggtttaactgaaagggaagcagcagcccttatagtggaagaagccagaatgattctgcagcaggacttagttgaaatgggagtgcaatggaatccatgtgccctgttacattctagtacatgctcattgactcatagtgagtccgaagtaaaggaacacacatttatatcccaaactaagagttcttataaaaaattaacatcaaagaacaaaagtaacacaatatttagtgattcttatattaagcattcaccaaatatagtgcaagacttaaataaaagtagagagcatacaagttcctttaattgtaatttccagaatgggaatcaagaacatcagacatgttccattttcagagcaagaaaacgggcctctttagatataaataaagagaagccaggagcctctcagaatgaggggaaaacaagtgataagaaagttgttcagactttttcacagaaaacaaaaaaggcacctttgaatttcaattcagaaaagatgagcagaagttttcgatcttggaaacgtagaaagcatctaaagcgatctagggacagcagccccctgaaagactctggagcgtgtagaatccatttacaaggacagactctgtctaatcctagtctttgtgaagacccgtttaccttagatgagaagaaaacggaatttagaaattcagggccatttgctaaaaatgtatctttgagtggtaaggaaaaagataataaaacatcattcccattacaaataaagcaaaattgttcatggaacataacactaactaatgataattttgtggagcatattgtcacaggatctcagagtaaaaatgtgacttgtcaggccactagtgtggttagtgaaaagggcagaggagtagctgttgaggcagaaaaaataaatgaagtgctgatacaaaatggttcaaaaaaccagaatgtttatatgaaacaccatgacatccatccaattaaccagtacctgcgaaagcaatctcatgaacagacaagcactattaccaaacagaaaaatataatagagagacaaatgccctgtgaagcagtcagtagttacataaatagagactcaaatgttactatcaattgtgaaaggataaagcttaatacagaggaaaataaaccaagtcattttcaggcattaggagatgatataagcagaactgtgatacccagtgaagtacttccatcagctggagcatttagcaaatcagaaggccagcatgagaattttctaaatatttctagactacaagaaaaaacaggtacttatacaacaaacaaaactaaaaataatcatgtttctgacttaggtttagtcctctgtgattttgaagatagtttctatctggatactcagtcagagaaaataatacaacagatggcaactgaaaatgccaaactaggagcaaaggacaccaacctggcagcagggataatgcagaagagcttagtccaacagaactcaatgaactcttttcagaaggagtgtcacattccttttcctgctgaacagcaccctctaggagcgactaagatagatcatttggaccttaagactgtaggtactatgaaacaaagcagtgattcacatggggttgatatcctgactccagaaagcccgattttccattctccaatactattggaggaaaatggtctttttttaaaaaagaatgaagtttctgttactgattcacaattaaatagttttcttcaaggttatcaaacacaagaaactgtgaaaccagttatacttctgattcctcaaaagagaactcccactggtgtagaaggagaatgtcttccagttcctgaaacaagtttgaatatgagtgatagtttactatttgatagcttcagtgatgactatctagtaaaagaacaattacctgatatgcaaatgaaagaaccccttccttcagaagtaacatcaaaccattttagtgattctctgtgtctacaagaagacctaattaaaaaatcaaatgtaaatgagaatcaagatacccaccagcagttgacttgttccaatgatgaatctattatattttcagaaatggattctgttcagatggttgaagctttggacaatgtggatatatttcctgtccaagagaagaatcatactgtagtatctcctagagcattagaactaagtgatccagtacttgatgagcaccaccaaggtgatcaagatggaggagatcaagatgaaagggctgaaaaatcaaaattaactgggaccaggcaaaatcattcattcatatggtcaggggcatcatttgatctaagtccaggactgcaaaggattttagataaagtatccagtcctctagaaaatgaaaagctaaaatcaatgactataaacttttccagtttgaatagaaaaaatacagagttaaatgaagaacaagaagttatttcaaacttggagacaaaacaagtgcagggaatttcattttcttctaataatgaagtaaaaagcaagattgagatgctagaaaacaatgccaatcatgatgaaacctcatccctcttacctcgtaaagaaagtaatatagttgatgataatggtctcattcctcctacacccattccaacatctgcttctaagctgacatttccagggattcttgaaacacctgtaaacccttggaaaactaataatgttttacaacctggtgaaagttatttatttggctcaccttcagatattaaaaaccacgatttaagtccagggagtagaaatgggttcaaagacaacagccctattagtgacacaagcttttcacttcagttatcacaggatggattacagttaactccagcctcaagcagttcagaaagtttgtccataattgatgtagcaagtgaccaaaatcttttccaaacattcattaaggagtggcggtgcaaaaagcgattttccatctcactggcttgtgaaaagattagaagtttgacatcttctaaaactgctactattggcagtaggtttaagcaagctagctcacctcaggaaattcctattagagatgatggatttcccattaaaggttgtgatgacaccttggtggttggactggcagtatgctggggtggaagggatgcctattatttttcactgcagaaggaacaaaagcattctgaaattagtgccagtttggttccaccttctttagatccaagcctgactttgaaagacaggatgtggtaccttcaatcttgcttgcgaaaggaatctgataaagaatgttctgttgtcatctatgacttcatccagagctataaaattcttcttctttcttgtggcatctccttggagcaaagttatgaagatcctaaggtggcatgctggttactagatccagattctcaggagccgactcttcatagcatagttaccagttttcttcctcatgagcttccactcctagaagggatggagaccagccaagggattcaaagcctggggctaaatgctggcagtgagcattctgggcgatacagagcatctgtggagtccattctcatcttcaactctatgaatcagctcaactctttgttgcagaaggaaaaccttcaagatgttttccgtaaggtggaaatgccctctcagtactgcttggccttgctagaactaaatggaattggctttagtactgcagaatgtgaaagtcagaaacatataatgcaagccaagctggatgcaattgagacccaggcctatcaactagctggccacagtttttctttcaccagttcagatgacatcgctgaggttttatttttggaattgaagttgcccccaaatagagagatgaaaaaccaaggcagcaagaaaactctgggttctaccagaagagggattgacaatggacgcaagctaaggctgggaagacagttcagcactagtaaggacgttttaaataaattaaaggcattacatcctttaccaggcttgatattagaatggagaagaatcactaatgctattaccaaagtggtctttccccttcagcgggaaaagtgtcttaatccttttcttggaatggaaagaatctatcctgtatcacagtcgcacactgctacaggacgaataacctttacagaaccaaatattcagaatgtgccaagagattttgaaatcaaaatgccaacactagtaggagaaagcccaccttctcaagctgtaggcaaaggcctacttcccatgggcagaggaaaatataagaagggtttcagcgtgaatcctagatgccaggcacagatggaggagagagctgcagacagaggaatgccattttcaattagcatgcgacatgcctttgtgcctttcccaggtggttcaatactggctgctgactactctcagcttgaactgaggatcttggctcatttatcccatgatcgtcgtctcattcaagtgttaaacactggagctgatgttttcaggagcattgcagcagagtggaagatgattgagccagagtctgttggggatgatctgaggcagcaggcaaaacagatttgctatgggatcatttatggaatgggagctaaatctttgggagagcagatgggcattaaagaaaatgatgctgcatgctatattgactccttcaaatccagatacacagggattaatcaattcatgacagagacagtgaagaattgtaaaagagacggatttgttcagaccattttgggaaggcgtagatatttgccaggaatcaaagacaacaacccttatcgtaaagctcacgctgagcgtcaagctatcaacacaatagtccaaggatcagcagctgatattgtcaaaatagccacagttaacattcagaagcaattagagaccttccactcaaccttcaaatcccatggtcatcgagagggtatgctccaaagtgaccaaacaggattgtcacgaaagagaaaactgcaagggatgttctgcccaatcagaggaggcttcttcatccttcaactccatgatgaactcctatatgaagtggcagaagaagatgttgttcaggtagctcagattgtcaagaatgaaatggaaagtgctgtaaaactgtctgtgaaattgaaagtgaaagtgaaaataggcgccagctggggagagctaaaggactttgatgtgtaactgtgctgttgatgaagtcctcccagggaagcctgtgcagatgcagtcacctggaaagaacagagattaccctttcacctacctcagcaaaacaaactttcaagtcttgatagacttagcctagtaattttatagtgagagtttcaaactatatatcagtgtctatagcatcaaaaacttctgggggcgtgggggaagtagaataccaagtataatagttacattcactttcaaagagcatctatgaatttgccttttgtaacttactgtggctttaaacatattcagaacagatgcttgaaatatgcacttagcactttggttccacatctgtctgggtaaaccatgaagaaaatgaagctgctgcctcaatcgacccagacagcagccataggcagataaagatttggtttcaccctggtggtggtaggcatcgtgtgtgactttttttcctctaatatcaattttacagtacggaaatagtattttaaaatagtattggctaataaattatgaattctataaagtagtaagacttggtatggttggagtgtaggaatgaatattcatgaaatgtttcttattgcttttccttccctaattcatacaatgaatgtatttggaatacttacatattataaaataaactatacctcttcaagaggtatcctgttctgtaagatcagatgtttttattgcaggtcaatataatactgccagagacagaaaatacccccttatcagtcccttagtgcctctttctgtttgtggcatggtgagaaaacccatgctgaaaagattgtactttgtgatcccaatcagagggatggagctaatctttttgctgttgaaataaaatgaatttatgagaaactttaaaaaaaa

SEQ ID NO: 6965 - DNA, 3690 bp, Homo Sapiens
  NM_199424
gcgtgtggttcttggagaaagttggaggtggtggtgatttcagtcgccttggccgccttgagccggagctgagcggaggcactgggccgagcctgcttcccgggccttcctaccatgccagggctgctccctgcctccgccaccctggcacaccttcacccgcgtaccgcctcctccccgtcgctctgccttttccaaaactcacttgggccctccgtgcgcagggttcttttttggtttttctgtaaaaatcaaaacaaaaaacagagacttttgagaggagcagatgccacctaaagtcccactgcattccctgcaaagcgctcaaatgtggaagccagtcattggcatttttattttttattgattgattgattttttcaccagtggctttttgtaacctctgtgttctgctgtgtttcttgtgtttagtcttcgagtgcttcgactgaccatgatcccctgggccccctccctcctggctgggagaagagacaggacaatggacgggtgtattacgtgaaccataacactcgcacgacccagtgggaggatccccggacccaggggatgatccaggaaccagctctgcccccaggatgggagatgaaatacaccagcgagggggtgcgatactttgtggaccacaatacccgcaccaccacctttaaggatcctcgcccggggtttgagtcggggacgaagcaaggttcccctggtgcttatgaccgcagttttcggtggaagtatcaccagttccgtttcctctgccattcaaatgccctacctagccacgtgaagatcagcgtttccaggcagacgcttttcgaagattccttccaacagatcatgaacatgaaaccctatgacctgcgccgccggctctacatcatcatgcgtggcgaggagggcctggactatgggggcatcgccagagagtggtttttcctcctgtctcatgaggtgctcaaccctatgtattgtttatttgaatatgccggaaagaacaattactgcctgcagatcaaccccgcctcctccatcaacccggaccacctcacctactttcgctttataggcagattcatcgccatggcgctgtaccatggaaagttcatcgacacgggcttcaccctccctttctacaagcggatgctcaataagagaccaaccctgaaagacctggagtccattgaccctgagttctacaactccattgtctggatcaaagagaacaacctggaagaatgtggcctggagctgtacttcatccaggacatggagatactgggcaaggtgacgacccacgagctgaaggagggcggcgagagcatccgggtcacagaggagaacaaggaagagtacatcatgctgctgactgactggcgtttcacccgaggcgtggaagagcagaccaaagccttcctggatggcttcaacgaggtggccccgctggagtggctgcgctactttgacgagaaagagctggagctgatgctgtgcggcatgcaggagatagacatgagcgactggcagaagagcaccatctaccggcactacaccaagaacagcaagcagatccagtggttctggcaggtggtgaaggagatggacaacgagaagaggatccggctgctgcagtttgtcaccggtacctgccgcctgcccgtcgggggatttgccgaactcatcggtagcaacggaccacagaagttttgcattgacaaagttggcaaggaaacctggctgcccagaagccacacctgcttcaaccgtctggatcttccaccctacaagagctacgaacagctgagagagaagctgctgtatgccattgaggagaccgagggctttggacaggagtaaccgaggccgcccctcccacgccccccagcgcacatgtagtcctgagtcctccctgcctgagaggccactggccccgcagcccttgggaggcccccgtggatgtggccctgtgtgggaccacactgtcatctcgctgctggcagaaaagcctgatcccaggaggccctgcagttcccccgacccgcggatggcagtctggaataaagccccctagttgcctttggccccacctttgcaaagttccagagggctgaccctctctgcaaaactctcccctgtcctctagaccccaccctgggtgtatgtgagtgtgcaagggaaggtgttgcatccccaggggctgccgcagaggccggagacctcctggactagttcggcgaggagactggccactgggggtggctgttcgggactgagagcgccaagggtctttgccagcaaaggaggttctgcctgtaattgagcctctctgatgatggagatgaagtgaaggtctgagggagcgggccctggggcgaggccatctctgcctgcctccctagcaggcgccagcggtggaggctgagtcgcaggacacatgccggccagttaattcattctcagccaatgaaggtttgtctaagctgcctgggtatccacgggacaaaaacagcaaactccctcagactttgtccatgtataaacttgaagtggttgtgttgtagggttgcaggttttttgttacgctgctgtcactttctgtccaggagctggcaccccaggtgttctgagaccttgagggacccagacctttgggtccaagagtttcccaaacagccacgcctctcaggaacccacctggcggttccgtgagctcaggcaggcctgacccggcggcacagcctggcagggacctcgtccccaagcctggcagaatgagaggggttgaggtcccgagcgccactcctagccttgccgccttcaatagagaagaaatccctttgctagatagggtcccccaggcagtccccagtggcgggacacaggggtccggctgtggagctcccctgccagcccctggagctccaggagggcctgttggtcccctgttcagaatggagtgcagcccgccagcggaaagtgttcattctgcataggtgtgaggctttatctgcacacaggacatgaaaaccagcagaaaggccctgagctgctgcatagccccatctgatttctgcagttcccgccagcctccaacacggggactctgccgtaactggaatcttcataggtcatattgaaatcttcaaggtgaccatgccccaccggggtgctggggcagtagtcatggcagactcccggcctgggcccccaggattctaggacccccaggcagccccttggactggtcccgggtgccttccaagcacagtctccatgctcccagattctcgaccttcccccggcccgggaggtgcagcctgcgtctgcctctgtcgtgtgtgctgatttgagtggcttagcttgccacagcgcagcctcttctgtccctttcagtcatttgctgtacttccctgtggcacgttaccatggaagccgctccagggtgggtcagggtgcaagctgctggtgaggtttggaagcatcaggctcacgggtgttcatgtgtgttcgtgcgtgtgtgtgcgtacgtgtatataactgaagtgtctgtacggaatgccctttgctagccatgggctggtcaccagattgttttgtaatgcccgccccttgcctcgatattgccagtttcttgtgcaataaacaatcagcagctgtaaaaaaaaaaaaaaaaaaaaaaaa

SEQ ID NO: 6966 - DNA, 1010 bp, Homo Sapiens
  NM_199483
gggcgcgcgacactgcaccgcccctcccttcgcggcgcctgctctgtagagccggcggaaccgggtagcttggccaggttgtgaggaaccgcagcgcgccgcaggaccgggccgctgagcctgcagccgccccgcgccgtgacctgcgaccctagaccccgactccctttggctcagcccgcgcgccccaggcccggcccgggcggcgcgacgggaggatgagcggcgggcggcggaaggaggagccgcctcagccgcagctggccaacggggccctcaaagtctccgtctggagtaaggtgctgcggagcgacgcggcctgggaggataaggatgaatttttagatgtgatctactggttccgacagatcattgctgtggtcctgggtgtcatttggggagttttgccattacgagggttcttgggaatagcagggtcatttggatcatcttttacactgccatccattatgactgatggtgtacagctcccaagtgctccctatccagtccaaaggaccctcttgattacagcacaggaacttgatcgttggggaaccccagccccttggaacttggaagacccgtgtttcctggaccgcgaatcagtgtgttgggcatcagtgttttctgcaagggttgtgacctgaaactttttaaaaaccacccacctttggggaagcatttctgaatttatccatcaccaaccatttcttcttggataccatcaagtaacagctattatttgccaagtggagctgtcatttaatttgatgcacctctggattcagatgaaacattaaattgtcttcctcgattctccatcgggtgtagagtttttaaactatcaatggcatttcaagtcttctgaaacagcatggctgtatgtgcgtggtccatagcacagtacatgcagcatctaataagagtttccattgtagaatgttttcacatacttgaataaatcaaatctttaattgagaaaaaaaaaaaaaaaaaaaaaaaaaaaa

SEQ ID NO: 6967 - DNA, 2383 bp, Homo Sapiens
  NM_199487
gcagggagagcgtgcccgggcacgacagcctggtgcacagccgagaaaacaacagcgcgtgcgcgtagcgacctctttgcgcctgcgccccccttgccagtctttcgccggcaaaaggaggacgtagaaaaggggacaccggaaactcactcttcacccggaaatggttattgaggaacatggcgttgctggtgcgagtccttaggaaccagactagcatttctcagtgggttccagtatgcagccgattgatacctgtgtctcctacccaaggacagggggacagggctctgtctcgcacttcccagtggccccagatgagccagtcccgagcatgtggtggatcagaacagattcctggaatagacatacagctgaataggaagtatcacaccacacgtaagctttctactaccaaagattccccacagcctgttgaggagaaggttggtgctttcacaaagataatagaagccatgggattcacgggacctttgaaatacagtaaatggaagattaagattgcggccctgcgcatgtatactagctgtgtggagaaaactgacttcgaggaattctttctaaggtgtcagatgcctgatacattcaattcatggtttcttataaccctactccacgtctggatgtgtctagtccgaatgaagcaggaaggccggagtgggaagtacatgtgtcgtatcatagttcattttatgtgggaggatgttcagcagcgcggcagagtcatgggggggatcctttcagatgatcatgggctggccgctgccctctggagaaccttcttcaaccggaaatgtgaagaccctcgacatcttgaattgctggtagagtatgtgaggaaacagatacagtacctggactccatgaacggggaggatctgcttctgacaggggaggtgagctggcgccctctagtggagaagaatcctcagagcatcctgaagccccattctccgacttacaacgacgagggactttgatgggctgggccctccgcacggcccgccagctggcttcgaggaacctccaggagagaagtgcctgttggtccaggaccctgcagaaagtggcctgaactgacctctgaacagcatctgtcaaatacctggccccatttgtgttgagtttcctcttagtgtgcccaggagtctgatctgctggggtacagggctgggagaacccctagctctcccggggtgtcctctcccttaggggaagccccgagtgagagtcccccagcacacactccccaaccccctccagcaactacatgtgactgatagcttttcccaaaggccaaggaagggatggtgtaggttcaaaagggaaaccccccagggcctgctgtggcctaggagcagattgtaatgctgccgagtccggtcggtgaccacgcgttgtccctcggctttcagccatggggttgagttggccattaaaagaaacagagacttctctctgccatggcccttctttattccagggacttagaaacttgcctgagatggtggacgcagtaatgagggcaccgcgcagctcagttagagacggagaaagggaagaggctgggatggtctctgctgctcttgcctctagttcatggagatgtgtctctgttcaggccaagatacagccagccaggcctgtcgtctgggacccaggaggcctctgatgaccaagggctttcacatcctaagtcatttggaaggaggccttgagaacaaagtcacctttgtcactcccagtgaactgaatgaggaacatgctgtctcctgtcttggcctcccctttcatgagatactggggagaagagaacattcctcctggcttagttgtagcagacccagacctgtgcccagctttggtcccccttcccaacttctgaagcacgtgctgcagagccaccttggtctgagcacctgaggaccagcccctcctccctcagtgcgggtcatctcttgggggattttcttaaagtgaagaaagggggtggggaaccatattgcccctccctcccccatcaaacttccttcatttaacttgctataaaatgagtcatataaagaaactctatatgggtgaggtatatcccacttctgtgaaaacattacaaatcaaaccgcttctctcagtttatttaagatgcttttgttgcgagcggagctctagagtgaagcctcctgtgtgtgtgtgagataataacaccttgtaactcattacagctgggcactatttacataaaccagagctgagccaggcaggaatttgctgattaatttatttttaatggagtgaagtataccatgcaccaaaataaactttactgtgtgtacctaactgctcctggaaaaaaaaaaaaaaa

SEQ ID NO: 6968 - DNA, 1689 bp, Homo Sapiens
  NM_201224
acttccggagacctcacacaagatggcggcacccgaggaacacgattctccgaccgaagcgtcccagccgattgtggaagaggaggaaactaaaacatttaaagacctgggtgtgacagatgtgttgtgtgaagcttgtgaccagttgggatggacaaaacccaccaagatccagattgaagctattcctttggccttacaaggtcgtgatatcattgggcttgcagaaactggctctggaaagacaggcgcctttgctttgcccattctaaacgcactgctggagaccccgcagcgtttgtttgccctagttcttaccccgactcgggagctggcctttcagatctcagagcagtttgaagccctggggtcctctattggagtgcagagtgctgtgattgtaggtggaattgattcaatgtctcaatctttggcccttgcaaaaaaaccacatataataatagcaactcctggtcgactgattgaccacttggaaaatacgaaaggtttcaacttgagagctctcaaatacttggtcatggatgaagccgaccgaatactgaatatggattttgagacagaggttgacaagatcctcaaagtgattcctcgagatcggaaaacattcctcttctctgccaccatgaccaagaaggttcaaaaacttcagcgagcagctctgaagaatcctgtgaaatgtgccgtttcctctaaataccagacagttgaaaaattacagcaatattatatttttattccctctaaattcaagagtaagcgcctaggatcccttaataagtttaaggccaaggcccgttccattcttctagcaactgacgttgccagccgaggtttggacatacctcatgtagatgtggttgtcaactttgacattcctacccattccaaggattacatccatcgagtaggtcgaacagctagagctgggcgctccggaaaggctattacttttgtcacacagtatgatgtggaactcttccagcgcatagaacacttaattgggaagaaactaccaggttttccaacacaggatgatgaggttatgatgctgacagaacgcgtcgctgaagcccaaaggtttgcccgaatggagttaagggagcatggagaaaagaagaaacgctcgcgagaggatgctggagataatgatgacacagagggtgctattggtgtcaggaacaaggtggctggaggaaaaatgaagaagcggaaaggccgttaatcacttttatgaaggctcgagttctgctgttctgtaaaagagaattggagaatgaaacctgctccaacagagatcatgagactgaaattggtcagaattgtgtccagaatgtgctcagctaattcagtattcttccccattctgggttggagtttactgcagagtaattcttacagtgctgatgtcaagactgttactgttcttcgactttgattccttgctcatgacatgagtagggtgtgctcttctgtcacttcacacagaccttttgccttttttagctgcaagtcaaggactaggttgatgatgcccatgacctgtaattgtaaagaagcttggacatctgcaaatgatatttaaaccatcttggcttgtgctttattcaaactaatgtgaaacaataaatttaaatattatttttaaaagaaaaaaaaaaaaaaaaaaaa

SEQ ID NO: 6969 - DNA, 2361 bp, Homo Sapiens
  NM_201277
gaaagagtgagagccgcccacgagctctgagcagagagcccgcaggagtgccacgtcccggcggcctcggcccctccctgcctcagtttcccgtggcatcaaagggggcgaggggcccctccaggcctctggtgacgggggtgctgtgcccaggcgggggtccgggggcgaccgagggggctcaggaagtccgcggccgcaggaattcggcgcctccaggccttataaggacatttgcgctccgggccaatcagcggcgggggcgtggcgcgcggagcccggcgcgtcccaaccccgcgccagcccggcggtcccgtcccgtcccgtcctgtgcggccccgtcccgccgcccgcccgccagccatgagctccacgcagttcaacaagggcccctcgtacgggctgtcggccgaggtcaagaaccggctcctgtccaaatatgacccccagaaggaggcagagctccgcacctggatcgagggactcaccggcctctccatcggccccgacttccagaagggcctgaaggatggaactatcttatgcacactcatgaacaagctacagccgggctccgtccccaagatcaaccgctccatgcagaactggcaccagctagaaaacctgtccaacttcatcaaggccatggtcagctacggcatgaaccctgtggacctgttcgaggccaacgacctgtttgagagtgggaacatgacgcaggtgcaggtgtctcttctcgccctggcggggaagatgggcaccaacaaatgcgccagccagtcgggcatgactgcctacggcacgagaaggcatctctatgaccccaagaaccatatcctgccccccatggaccactcgaccatcagcctccagatgggcacgaacaagtgtgccagccaggtgggcatgacggctcccgggacccggcggcacatctatgataccaagctgggaaccgacaagtgtgacaactcctccatgtccctgcagatgggctacacgcagggcgccaaccagagcggccaggtcttcggcctgggccggcagatatatgaccccaagtactgcccgcaaggcacagtggccgatggggctccctcgggcaccggcgactgcccggacccgggggaggtccctgaatatcccccttactaccaggaggaggccggctactgaggctcccagcacgctctctccccacatcgtctgcccatctgggtttttgggtttttctgtgttttcatcttttttttttttttcttaacccgttcagtgctgccagtcaaccaagggtctgtgagtgtcagcgtgggatcaggcagcagagcttttttcccctttgccttgatccttcgcaaggctgagccactgggctgtgggggaaggggtcaaggccatatcccaatacgtgtagggcgagggtccctgctggcacattcaggctgtgctgggaagaagagacctgggcttggaaggaaccggtccccgacggtttctgcttgcctcgcctcttcccccttttgtcagctgagcagtttgtggtttctatgcccgcaagtttcaggaagtattcacaaaagaaaaatacattttttcccccaggggtggggcaaggacagtggagagagtgctaggaaatgagtcccctgggaaaggggaccgggccgtgatgttaaatatctccggctcccaagtgactggatttgcctaggaccttcagatcaacagacttcagaccctcagacctgccccggggccaggtggagaaagtgagggccgtacaaggaagtgaaattctgagttgttggggctaagcctgaccccctctccatgctccccgccccaactcactctggcctcagtagatttttttttcagttgtggttgttgcccaggctggagtgcagtggcgccatcttggctcactgcacctccaccttccgggctcaagcgattctccagcctcagcctcctgagtagctaggactgcaggtgctccaccacgcccggctaatttttgtatttttagtagagatggggtttccccatgttggccaggctggtctcgaactcctggcctcaggtgtgatccgcccgcctccgcctccccaagcgctgagattacaggtgtgagccaccgtgcccaggccctcagtaggttttaaggagtccccagccctcctcccttctgggcccgaccagcttatactgctccatcttccccggccacatgccccgccaagtactgcacagggaccccccacccaggggccctgctccgtgagataatgtgaaatacgactgtggaccaaacgcaataaaacctctgtttgtacgaagaaaaaaaaaaaaaaaaaaaaa

SEQ ID NO: 6970 - DNA, 2695 bp, Homo Sapiens
  NM_201280
aggcgcagcgtggccgcgggtgggcggaactggtcgggatgagtggcggagggacagagacccctgtgggttgtgaggccgccccgggcggtggcagcaagaagagggactccctggggactgcgggctcagcgcacctcattatcaaggatcttggagaaattcattcaaggcttttggatcacagaccagttattcaaggtgaaactcgttattttgtaaaagaatttgaagaaaaacgtggtcttcgagaaatgcgagttcttgaaaatttgaagaacatgatccatgaaacaaatgaacatactcttcccaaatgtagagacacaatgcgggacagcctcagccaggttctccagagattgcaagcagctaatgactcagtctgtagactccaacagagggaacaggaacgaaaaaagattcatagtgaccacttagtagctagtgagaaacagcatatgctccagtgggacaacttcatgaaggagcaacccaacaaaagggctgaagtggatgaagagcacagaaaagccatggaaaggcttaaagaacaatatgctgagatggagaaggacctagcgaaattttcaaccttttaagaacttgaaccacaacaatcacaaactaatgagaagatgttcacctctctcctgaaaactattcccaccagaccgtttagcctctgcttcaagcttagcaatatattcagtggcactcttatatcagaagaaagaagtttctactggcattctgattggatatttaaagaagggtgccacatttttccagctttaagtgcctatatatgattatttgaatgaagaggagtaggaaggaaaatggaatcaatatactctttgttagtcagaattgatcatcttttccattgattagctcagagaactgtaggtatagacttcttagaaagataatttcattcatttctatacagggttaacaatagtttattattgtggcttaatgggaaggtatagaagctacctgtcatagcctccttggctgttggaaggatgtataaagtgttactgcatgagtaatgtagacaaaaaaaaaagccagctgtccttggagcagagatcacatttcagagaggtgagagtgaacacattgtctctgctgtggcaaagatggccacgctggtgtttgagctgcctcttgggaagcgttgcatattttacagtgcagcataatgccatgggcttccgtggatgggaagacacatgttaagttttgtggccttccagcacttactattttcagctttttaaagcatgcttagaaggaaaagcttaccaaaaatatattttgacatttagtttttccaagagctataatcttgcccatagtatttacctcatttttgtgtctgttttgctgtgggtaagctttataagataaataatgtctatacatgtttcgactgtttaatgagtaatcaacaaaatctgccagagagtccctctggaaccatataaagttcctggctttgaatgaaccagaagtgtttgcccacacagcaaatggtccatgttaaatgtaaatcctttttagtgttaatgtctgttctcataagcaggtatattatgatgaaacatgtaccagttctgtcatcactgtgatctttaaaaacctgcatttaacagtctaatttgaggctgggtgcagtggctcacacctgtaatctcaacactttgggaggccgaggcaggcggatcatttgaagtcaggagttcaagcctagcctggccaacatggtgaaaccccgtctctactaaaaatacaaaaattagcccggcatgttggtgcacgcttgtaatcccagctactcaggagtctgaggcacgagaatcacctgaactcaggaggcggaggttgcggtgagctgagatggcaccactgcactccagcttgggtgacagagtgagactccatctcaacaaaaaaaaaatctaactgaagaactaagttgattttttatttgccataaaccaagcaaaagtaaatgcaataatttcgagatttatggtaaacaaatttgaggtatggataaatctttcacatattttttattgctctttagtaaagaaaggcacaagaaagaaaatatccagctctcttgtgttatctcagtgtggcgactgcagaaaattgacaatgcctgcctgtgtaaatgtatggcttactgtcaaagcttcattcttggctgcatgttgaaaatgtgattaaagttaatagaggagatgaaataagtatttgagatttttttcaataacactgaacttctgccaactttctctatccgctactgtaggcttgacaggctcatcaatcatttgctggtacctggactaaaaagcgcacttgctgacaccaaggcatgttggaattttcttaattcagtggatggaaaaagaaatacttccaaaaatatcccacacatgaaaagggaggggagccttaaatgaaaattccctttgtaccgtagacactttttggaatgcgattaattgccaacacatcattgaacgaatgctgtaaccaagaaattaagattgtgtgtgtgaagggaatatattcttaactgtggctacccaacttgtatagcaaagatttctgatagtttgtgttcatctcatgtgaataataaatactttaccctaaaaaaaaaaaa

SEQ ID NO: 6971 - DNA, 1816 bp, Homo Sapiens
  NM_201398
ttcaatgtcagctaggtgcaaggcgggactttaagtacggaagctgccccgggacatgaggaaaggaacaagggaaagagccggtgaaggggcagaacaggcaggttccctcgacccaggaccccctgttcccaggctatggcccccagtgccctgtagacctggcaggccccccgtgcttgcgacccctatttgggggtctgggtggctactggagggccttgcagaggggcagagaaggcaggaccatgacatctagggcctctgaactttctccggggcgcagcgtgacggctggcatcatcattgttggagatgagatccttaagggacacactcaggacaccaacaccttctttctgtgccggacactgcgctccctaggggtccaggtttgccgagtctcagttgtacctgatgaggtagccaccattgcagctgaggtcacttctttctccaaccgcttcacccatgtcctcacagcagggggcatcggccccactcatgatgatgtgacctttgaggcagtggcacaggcctttggagatgagctgaagccacaccccaagttggaagcagccaccaaagccctaggaggggaaggctgggagaagctatcattggtgccctcctctgcccgcctgcattatggcacagatccttgcactggtcaacctttcagattccctctggtctccgtccgaaacgtctacctcttcccaggcattccagagctgctgcggcgggtgctggaggggatgaagggactattccaaaacccagctgttcagttccactcaaaggagctatatgtggctgctgatgaagcctccatcgcccccattctggctgaggcccaggcccactttggacgtaggcttggcctgggttcctaccctgactggggcagcaactactatcaggtgaagctgactctagactcagaggaagaaggacccctggaggaatgcttggcctacctgactgcccgtttgccccagggatcgctggtcccctacatgcccaacgctgtggagcaggccagtgaggctgtatacaaactcgctgaatcagggtcttctttggggaaaaaggtggcaggtgccctacagaccattgagacctccctggctcagtacagcctcacccagctctgtgtgggcttcaacgggggcaaagactgcactgccctcctgcacctcttccatgcagctgtgcagaggaaattacctgatgttccaaaccccctccagatcctgtatatccgcagcatctcccctttccctgagctggaacagtttctacaggacactatcaagaggtataatctgcagatgttggaagctgagggcagcatgaagcaggccctgggtgaactgcaggcacggcacccccagctggaggctgtccttatgggcacccgccggactgacccctactcctgtagcctctgccctttcagccccactgacccaggctggcccgcattcatgcgcatcaacccactgctggactggacctacagagacatctgggattttctgcgtcagctgtttgtcccatactgtatcctgtatgaccgaggatacacatcactggggagtcgggagaataccgtgcggaacccggccctgaagtgcctgagcccaggaggacaccccacataccgtccagcctatctactggagaacgaagaagaggagcggaactcccgcacatgacctcccaccctaggagggagggaaggacaccgtcctagggtataacctggcaataaaccgtgcctctcactgtgaaaaaaaaaaaaaaaaaaaaa

SEQ ID NO: 6972 - DNA, 3423 bp, Homo Sapiens
  NM_201414
ggatcagctgactcgcctggctctgagccccgccgccgcgctcgggctccgtcagtttcctcggcagcggtaggcgagagcacgcggaggagcgtgcgcgggggccccgggagacggcggcggtggcggcgcgggcagagcaaggacgcggcggatcccactcgcacagcagcgcactcggtgccccgcgcagggtcgcgatgctgcccggtttggcactgctcctgctggccgcctggacggctcgggcgctggaggtacccactgatggtaatgctggcctgctggctgaaccccagattgccatgttctgtggcagactgaacatgcacatgaatgtccagaatgggaagtgggattcagatccatcagggaccaaaacctgcattgataccaaggaaggcatcctgcagtattgccaagaagtctaccctgaactgcagatcaccaatgtggtagaagccaaccaaccagtgaccatccagaactggtgcaagcggggccgcaagcagtgcaagacccatccccactttgtgattccctaccgctgcttagttggtgagtttgtaagtgatgcccttctcgttcctgacaagtgcaaattcttacaccaggagaggatggatgtttgcgaaactcatcttcactggcacaccgtcgccaaagagacatgcagtgagaagagtaccaacttgcatgactacggcatgttgctgccctgcggaattgacaagttccgaggggtagagtttgtgtgttgcccactggctgaagaaagtgacaatgtggattctgctgatgcggaggaggatgactcggatgtctggtggggcggagcagacacagactatgcagatgggagtgaagacaaagtagtagaagtagcagaggaggaagaagtggctgaggtggaagaagaagaagccgatgatgacgaggacgatgaggatggtgatgaggtagaggaagaggctgaggaaccctacgaagaagccacagagagaaccaccagcattgccaccaccaccaccaccaccacagagtctgtggaagaggtggttcgagttcctacaacagcagccagtacccctgatgccgttgacaagtatctcgagacacctggggatgagaatgaacatgcccatttccagaaagccaaagagaggcttgaggccaagcaccgagagagaatgtcccaggtcatgagagaatgggaagaggcagaacgtcaagcaaagaacttgcctaaagctgataagaaggcagttatccagcatttccaggagaaagtggaatctttggaacaggaagcagccaacgagagacagcagctggtggagacacacatggccagagtggaagccatgctcaatgaccgccgccgcctggccctggagaactacatcaccgctctgcaggctgttcctcctcggcctcgtcacgtgttcaatatgctaaagaagtatgtccgcgcagaacagaaggacagacagcacaccctaaagcatttcgagcatgtgcgcatggtggatcccaagaaagccgctcagatccggtcccaggttatgacacacctccgtgtgatttatgagcgcatgaatcagtctctctccctgctctacaacgtgcctgcagtggccgaggagattcaggatgaagttgatgagctgcttcagaaagagcaaaactattcagatgacgtcttggccaacatgattagtgaaccaaggatcagttacggaaacgatgctctcatgccatctttgaccgaaacgaaaaccaccgtggagctccttcccgtgaatggagagttcagcctggacgatctccagccgtggcattcttttggggctgactctgtgccagccaacacagaaaacgaagttgagcctgttgatgcccgccctgctgccgaccgaggactgaccactcgaccaggttctgggttgacaaatatcaagacggaggagatctctgaagtgaagatggatgcagaattccgacatgactcaggatatgaagttcatcatcaaaaattggtgttctttgcagaagatgtgggttcaaacaaaggtgcaatcattggactcatggtgggcggtgttgtcatagcgacagtgatcgtcatcaccttggtgatgctgaagaagaaacagtacacatccattcatcatggtgtggtggaggttgacgccgctgtcaccccagaggagcgccacctgtccaagatgcagcagaacggctacgaaaatccaacctacaagttctttgagcagatgcagaactagacccccgccacagcagcctctgaagttggacagcaaaaccattgcttcactacccatcggtgtccatttatagaataatgtgggaagaaacaaacccgttttatgatttactcattatcgccttttgacagctgtgctgtaacacaagtagatgcctgaacttgaattaatccacacatcagtaatgtattctatctctctttacattttggtctctatactacattattaatgggttttgtgtactgtaaagaatttagctgtatcaaactagtgcatgaatagattctctcctgattatttatcacatagccccttagccagttgtatattattcttgtggtttgtgacccaattaagtcctactttacatatgctttaagaatcgatgggggatgcttcatgtgaacgtgggagttcagctgcttctcttgcctaagtattcctttcctgatcactatgcattttaaagttaaacatttttaagtatttcagatgctttagagagattttttttccatgactgcattttactgtacagattgctgcttctgctatatttgtgatataggaattaagaggatacacacgtttgtttcttcgtgcctgttttatgtgcacacattaggcattgagacttcaagcttttctttttttgtccacgtatctttgggtctttgataaagaaaagaatccctgttcattgtaagcacttttacggggcgggtggggaggggtgctctgctggtcttcaattaccaagaattctccaaaacaattttctgcaggatgattgtacagaatcattgcttatgacatgatcgctttctacactgtattacataaataaattaaataaaataaccccgggcaagacttttctttgaaggatgactacagacattaaataatcgaagtaattttgggtggggagaagaggcagattcaattttctttaaccagtctgaagtttcatttatgatacaaaagaagatgaaaatggaagtggcaatataaggggatgaggaaggcatgcctggacaaacccttcttttaagatgtgtcttcaatttgtataaaatggtgttttcatgtaaataaatacattcttggaggagcaaaaaaaaaaaaaaaa

SEQ ID NO: 6973 - DNA, 2668 bp, Homo Sapiens
  NM_201429
gcatgcgcgctcgcgctcccgccctctagctgcgctcggctgagtcagtcagtctgtcggagtctgtcctcggagcaggcggagtaaagggacttgagcgagccagttgccggattattctatttcccctccctctctcccgccccgtatctcttttcacccttctcccaccctcgctcgcgtagccatggcggagccgtcggcggccactcagtcccattccatctcctcgtcgtccttcggagccgagccgtccgcgcccggcggcggcgggagcccaggagcctgccccgccctggggacgaagagctgcagctcctcctgtgcggattcctttgtttcttcctcttcctctcagcctgtatctctattttcgacctcacaagtgcacgatctgattttctggagagatgtgaagaagactgggtttgtctttggcaccacgctgatcatgctgctttccctggcagctttcagtgtcatcagtgtggtttcttacctcatcctggctcttctctctgtcaccatcagcttcaggatctacaagtccgtcatccaagctgtacagaagtcagaagaaggccatccattcaaagcctacctggacgtagacattactctgtcctcagaagctttccataattacatgaatgctgccatggtgcacatcaacagggccctgaaactcattattcgtctctttctggtagaagatctggttgactccttgaagctggctgtcttcatgtggctgatgacctatgttggtgctgtttttaacggaatcacccttctaattcttgctgaactgctcattttcagtgtcccgattgtctatgagaagtacaagacccagattgatcactatgttggcatcgcccgagatcagaccaagtcaattgttgaaaagatccaagcaaaactccctggaatcgccaaaaaaaaggcagaataagtacatggaaaccagaaatgcaacagttactaaaacaccatttaatagttataacgtcgttacttgtactatgaaggaaaatactcagtgtcagcttgagcctgcattccaagctttttttttaatttggtgttttctcccatcctttccctttaaccctcagtatcaagcacaaaaattgatggactgataaaagaactatcttagaactcagaagaagaaagaatcaaattcataggataagtcaataccttaatggtggtagagcctttacctgtagcttgaaaggggaaagattggaggtaagagagaaaatgaaagaacacctctgggtccttctgtccagttttcagcactagtcttactcagctatccattatagttttgcccttaagaagtcatgattaacttatgaaaaaattatttggggacaggagtgtgataccttccttggtttttttttgcagccctcaaatcctatcttcctgccccacaatgtgagcagctacccctgatactccttttctttaatgatttaactatcaacttgataaataacttataggtgatagtgataattcctgattccaagaatgccatctgataaaaaagaatagaaatggaaagtgggactgagagggagtcagcaggcatgctgcggtggcggtcactccctctgccactatccccagggaaggaaaggctccgccatttgggaaagtggtttctacgtcactggacaccggttctgagcattagtttgagaactcgttcccgaatgtgctttcctccctctcccctgcccacctcaagtttaataaataaggttgtacttttcttactataaaataaatgtctgtaactgctgtgcactgctgtaaacttgttagagaaaaaaataacctgcatgtgggctcctcagttattgagtttttgtgatcctatctcagtctgggggggaacattctcaagaggtgaaatacagaaagcctttttttcttgatcttttcccgagattcaaatctccgattcccatttgggggcaagtttttttcttcaccttcaatatgagaattcagcgaacttgaaagaaaaatcatctgtgagttccttcaggttctcactcatagtcatgatccttcagagggaatatgcactggcgagtttaaagtaagggctatgatatttgatggtcccaaagtacggcagctgcaaaaagtagtggaaggaaattgtctacgtgtcttggaaaaattagttaggaatttggatgggtaaaaggtacccttgccttactccatcttattttcttagccccctttgagtgttttaactggtttcatgtcctagtaggaagtgcattctccatcctcatcctctgccctcccaggaagtcagtgattgtctttttgggcttcccctccaaaggaccttctgcagtggaagtgccacatccagttcttttcttttgttgctgctgtgtttagataattgaagagatctttgtgccacacaggatttttttttttttttaagaaaaacctatagatgaaaaattactaatgaaactgtgtgtacgtgtctgtgcgtgcaacataaaaatacagtagcacctaaggagcttgaatcttggttcctgtaaaatttcaaattgatgtggtattaataaaaaaaaaaaaaacacaaacaaaaaaaaaaaaaaaaaaaaaaaaa

SEQ ID NO: 6974 - DNA, 2542 bp, Homo Sapiens
  NM_201430
gcatgcgcgctcgcgctcccgccctctagctgcgctcggctgagtcagtcagtctgtcggagtctgtcctcggagcaggcggagtaaagggacttgagcgagccagttgccggattattctatttcccctccctctctcccgccccgtatctcttttcacccttctcccaccctcgctcgcgtagccatggcggagccgtcggcggccactcagtcccattccatctcctcgtcgtccttcggagccgagccgtccgcgcccggcggcggcgggagcccaggagcctgccccgccctggggacgaagagctgcagctcctcctgtgcggtgcacgatctgattttctggagagatgtgaagaagactgggtttgtctttggcaccacgctgatcatgctgctttccctggcagctttcagtgtcatcagtgtggtttcttacctcatcctggctcttctctctgtcaccatcagcttcaggatctacaagtccgtcatccaagctgtacagaagtcagaagaaggccatccattcaaagcctacctggacgtagacattactctgtcctcagaagctttccataattacatgaatgctgccatggtgcacatcaacagggccctgaaactcattattcgtctctttctggtagaagatctggttgactccttgaagctggctgtcttcatgtggctgatgacctatgttggtgctgtttttaacggaatcacccttctaattcttgctgaactgctcattttcagtgtcccgattgtctatgagaagtacaaggatccaagcaaaactccctggaatcgccaaaaaaaaggcagaataagtacatggaaaccagaaatgcaacagttactaaaacaccatttaatagttataacgtcgttacttgtactatgaaggaaaatactcagtgtcagcttgagcctgcattccaagctttttttttaatttggtgttttctcccatcctttccctttaaccctcagtatcaagcacaaaaattgatggactgataaaagaactatcttagaactcagaagaagaaagaatcaaattcataggataagtcaataccttaatggtggtagagcctttacctgtagcttgaaaggggaaagattggaggtaagagagaaaatgaaagaacacctctgggtccttctgtccagttttcagcactagtcttactcagctatccattatagttttgcccttaagaagtcatgattaacttatgaaaaaattatttggggacaggagtgtgataccttccttggtttttttttgcagccctcaaatcctatcttcctgccccacaatgtgagcagctacccctgatactccttttctttaatgatttaactatcaacttgataaataacttataggtgatagtgataattcctgattccaagaatgccatctgataaaaaagaatagaaatggaaagtgggactgagagggagtcagcaggcatgctgcggtggcggtcactccctctgccactatccccagggaaggaaaggctccgccatttgggaaagtggtttctacgtcactggacaccggttctgagcattagtttgagaactcgttcccgaatgtgctttcctccctctcccctgcccacctcaagtttaataaataaggttgtacttttcttactataaaataaatgtctgtaactgctgtgcactgctgtaaacttgttagagaaaaaaataacctgcatgtgggctcctcagttattgagtttttgtgatcctatctcagtctgggggggaacattctcaagaggtgaaatacagaaagcctttttttcttgatcttttcccgagattcaaatctccgattcccatttgggggcaagtttttttcttcaccttcaatatgagaattcagcgaacttgaaagaaaaatcatctgtgagttccttcaggttctcactcatagtcatgatccttcagagggaatatgcactggcgagtttaaagtaagggctatgatatttgatggtcccaaagtacggcagctgcaaaaagtagtggaaggaaattgtctacgtgtcttggaaaaattagttaggaatttggatgggtaaaaggtacccttgccttactccatcttattttcttagccccctttgagtgttttaactggtttcatgtcctagtaggaagtgcattctccatcctcatcctctgccctcccaggaagtcagtgattgtctttttgggcttcccctccaaaggaccttctgcagtggaagtgccacatccagttcttttcttttgttgctgctgtgtttagataattgaagagatctttgtgccacacaggatttttttttttttttaagaaaaacctatagatgaaaaattactaatgaaactgtgtgtacgtgtctgtgcgtgcaacataaaaatacagtagcacctaaggagcttgaatcttggttcctgtaaaatttcaaattgatgtggtattaataaaaaaaaaaaaaacacaaacaaaaaaaaaaaaaaa

SEQ ID NO: 6975 - DNA, 8211 bp, Homo Sapiens
  NM_201433
gtcccccgcctgcctgaggacccccgcgcaccccagagacggcgcgcgcccagagcgcgggagcccggagcgccgggcgcctgggaccccgcggagccgctgcccagcccgtggggctcggcgggaatgcaggctgcgctgtgaacccgggcgccaaggccatgtccggcgctcgctgccggaccctgtaccccttctccggggagcggcacggccaggggctgcgcttcgccgcgggcgagctgatcacgctgctgcaggtcccggacggcggctggtgggaaggcgagaaggaggacgggctccgtggctggttcccggcgagctacgtgcagttgctggagaagcctggaatggtcccccctccgccgggagaagaaagccagacggtcatccttccacctggctggcagagctacctgtcgcctcagggccggcggtactatgtcaacacgaccaccaatgagaccacctgggaacgtcccagcagttctcctgggattccagccagccctggctctcacaggagctctctgcctccaacagtgaatggataccacgcatcagggaccccagcgcaccctccagagactgcccacatgagtgtccgaaaatccaccggtgattcccagaacctgggatcctcatcgccaagcaaaaagcagagcaaggaaaacaccatcacaataaactgtgtgacgttccctcacccagacacgatgccggaacagcagctgctgaaaccaaccgagtggagctactgcgactacttctgggctgataagaaggacccccaaggcaacggcaccgtggctgggtttgaactactgctccagaaacagctgaagggcaaacaaatgcagaaggaaatgtcagaattcatccgggaaaggataaagattgaagaagactatgcgaagaacttagctaagctctctcagaactccttggcttcacaggaggaaggctccttgggagaggcgtgggcccaggtgaagaagagcctggcggacgaagcagaagttcacctcaagttctctgccaagcttcacagcgaggtggagaagcccctgatgaacttccgtgagaacttcaagaaagacatgaagaagtgcgaccaccacattgccgaccttcgcaagcagctcgccagccgctatgcctcggtggagaaggcccggaaagccctcacagagcggcagagagacctggagatgaagacccagcagctggagatcaagctgagcaacaagacagaggaggacatcaagaaggcgcggagaaagtccacacaggctggagacgacctcatgcgctgtgtggatctctacaaccaggcccagtccaaatggtttgaagagatggtgaccaccacattggagctagagcggctggaggtggagagggtagagatgatccggcagcacctgtgccagtacacgcagctgcggcatgaaacagacatgttcaaccaaagcacagtcgagcccgtggatcagctgcttcgaaaagtggacccggccaaagacagggagctgtgggtcagagagcacaagacgggcaacatccgccctgtggacatggagatctagatgggcctgtgcagcttcggggggtcctgctggggaggggggctgggctcccaccatggggcccatgccgagtggatgccccccaccctctctcctgggccactgaggagaggggagagagctggtgattccagaagggtgacccggacagcctagctgggggctcccccatattcccaggcccagaagacagacccacagccctgcccttgtctctgaggctgaagaccccctgactcccatgctgtgcttgccgctctgaaacaaacagaggctggaactttgtggtccttgccgagttttgtaggggtcactgtcacatgcttgtgccctggaagccccaaggctcttcctccagctggctcccttgtctccagggctttggaggatcagggtagggagggctctgtctctaagccaggtgtcaggatcagaatcatgggtagaaggtgccattcagctcacagccgcacccagaatcctttgcagccctccttctttatttttttcccattgcattctgggagtccacatctggctttctcagccactgttcatcaccaggggttttaggaggaaggcttggctcctgtcttcccagacccaccatgcctggagaggtcaggatggaactacctcattcggcaaattagccccaaattgagcgctgaatcgtgtcccatgagatcaggcgccatctgtaaagtctcctctggaaatgccaatccatccttcccccagctgcttcctcggggaggcccctgcccccaccctgccagcccttcccagtctcattagaggaagctttccaaagttctcagttatcaagacctcatccagctcgtccaaaggcttcagggatggaaacaaaccagctcgtctcagaggccagcaagctggggcctgtccgccacggtgccctgtgcacctttgggctgccctggcccccactctcccgggccgcccaccacaggctcttaatggggccgggtcagtcctacatgtgagatgggttagggcaagtctttgccatcccccagatggctctgtcttcttgtgtatggcagggctgggactgctgtcccttgtacagttttctgtcactggtgggcactggacaggcatagcagactctcttgtggccacactaggttgtcgcctttcaggcagtgtcccgccacctttgcttcccgctccttctggacattccagagccctgcaccaaacccttacttggtgtctgcacctcctttccctctctccatcttccaatccctggaaaagtctggtctgagtgtgacttgggaagctttcagtgctgctgtttggcccagctcattactttctccctttctctaccacagcaaacacattctccaccatgtcagtctaaagagtctaaaggggccgggagaagcatgagcgaggggcagattctagtcgggagcccatgccctggaaatccatctttcttcatctttcccattgaccactttgggtttgacctgcacatctgcagtgagggcagaattcaacaagcacaactcactggtctttcagtcaacgtgctagaaaccgatgacttattaatctctaattttttggcgcctctttcattgaatgagaattgctttcgtatagttcacattagaaaaatgcctaatatactaaagtaaaccaaacgttgtcacttttctcttgttcttgaaacattgcaaccaaaaaggtcagcacaaaggccttcacctacgtgaagacctcctggtaggatctgtccatgggatggagaaccactctgtccagatctggggttgggtcatgacaccagctaccaattttagaatattatttcttggtttctttatgaaaaatgggtgctagtggtaattgctttgtggcttagtaaactactctgtggatgatttccaaacattcaaagccaatagccttgttattaacaagatattttgagtacaatatggctcattgacttttccattacatctgaggattccagagtcctctgttcatccctgggatagagtgagccctcttgcgtcttccagggtagctcaggttggcccagtttgggccagtccatttttggaggtcactctttcccccctcatcccctcacctccttctctttacccccttcacgtacttcctttctttcttccctctgttattcattcatcaagcaggttaaagccattgtgctaagatctaatctgaggacactataatggccctgtcgtcagggaagcccgtgatcgctcgttttcaggggtcttaccggtcagcaaccttggcattgatacataggcactctacagaatttaagttttcagaggtaagtctgttgttctgattaatctgcattcattcagcgaatgctcaagacaagccaggcatgctgagaagcggcgctctagttgtatgtaagatgggcattcctctgctctcctctattctccatgtcgactgagaagagtataataagaacattgtaccctctccacacttaaccctctgggattctttattataatataaaccaccgtcgtgaggcatttacctgttggatggaaggtagacagcaacaagattttaatcacctggtcaccagaccctcacggcccatatccaattcgaatttcagaaatttctctgtttgctttaaataactctttacaaataagggtcgggcacggtggctcacgcctgtaatcccagctctttgggaggccgaggtgggcagatcacgaggtcaggagatcgagaccatcctggctaacatggtgaaaccccgtctctgctaaaaatacaaaaaattagccagatgtggtggtgcacacctgtagtcccaactattcggcaggctgaggcagtagaatcgcttgaacctgggaggcggagattgcagtgaaccaagatcgggccactgcactccagcttgggtgacagagcaagactccatctcaaaaaaattataaataactctttgcaaataggaaagtgaagctcaagggtaaccagtgaggctatgaaattgccagtgaattaagaccagggctagagtcaacagtccagaacccctatccgtatgaacaggggcccgtttctggttgaaatcaaggttaggatgcaactgagaaaataaaagactgcactttggagaggcaagcacgctatccgggttgttgttttgttttatgtcttggtgcttaggtgaggacttagctgggtttattcaaagtgggcgggtctgggctattcttgagaatgtcccttccatttctgagaacaagtcagccccttctacctgcctccacccaggagactgatgcacaagatctgtttgtgaaagcctgatttaaaaagaaaaaaaaaattccttaagccaaatggtgttccaagttggttgctgtgacaacctccaggaagagccacttgttaccctctattctttctagtgctttcagtcagtggcaacacataggccccttggaccgtggggatggcggccctgagattctgtcagtgggaccaccctgggcctcctttctacctccactcagcaccctgttggccaaggagaatttctgcggtgggaggcagtgctctgctagtcaggattgataaacagctgggcacaccgaaacagtgtaccaacgaattcaccaaccaggggtttctttccctaccctttgtgaaaaccaatcaattactagatgagtggatggatgcagaaaaatctgggctgagccaaagtcccttttggaaatacaagccataacattcgaaggacatcagcgaccttggcttgtttaggtgattttacttccagctgcaggtagtcttgacaaggagtgtttaaacagaaggctcaagatgcattccttgtgtaggtcggagagagcacttctaatgttaagtggggtacagatcagctgcccccccacgtagcctggacatcgtcttatccccataatccttgccatccctacaaggcccatcgccaccaccttttcccaggtttattgaggtatgattgacatccagtaaaattcaccctttggaaatatacagctctgtgaattttgacaaatttagtgtcttgtgaccatcaccaagatcaacctgtttttaaccctccaaaaaattcccttctcctgccctctttccctggcaaccctgattgattatctgatcctataattttgccttttctagaatgtcatataaatggagtcacactgatgtcgccttttgagtctggcatctttccctcagcttaatgcttttgagtcattcatgatgtgtgcgtgtggtttgttccttctccttgccgggaagtatttcattgcatgggcgtactactctgcttctttatttttacactgagcctttcgccctggaagttcttggcccagggtcttcaacttgtttgcacgaccacttccagcttgctgcttccttcagttccccaggctcctcctccaaatgccagctgtgcccacaagctgttcttagggctcacactcgccttttggcgcgtggtgggtttttggtagtgcagaaagaatccagggatgggaggggaagggacggatgggtgctcaattgctgctcacgtctgctgcaacctgaagcttgcatctcagccagcagatctgctcccttctgggacccaggcttcagtgtcacacggtccttggctatgtattgggcgttggaggctttgaaaggcgagcagaagcagcatggacaagaaggctggggctggccctggggctcatcatgatgctttcctggatctgttgcttcatctgcaagctgagggtgtttgttctagatgagtgtctcaggccaccggcaactgcatgtacctcctccctttctcatttccaatgatgtaccctgtacacgtgttcatgctgtgtctggctctcatctgcacaatcgtgcatagaattgcctcaagtcctggtgagagagatgccgtggtacttttccatttagattcaaatggagctaaaattaagagttttatgagctgttaagaatgaggtagtttctcctaggaccccccaaagacagtgcaagtaatgaccgtttggatctcattcgtcgatctttgatagtatgttctggagtctactccccaggagccaggacaggcgtgaagatggagtccttgtcgcagctggagccttgcctagctggtgatcacacagcctggcctgtacctgcaccccactggatggtggtacatggtggcagggacaggaccacacccagttaaggccagaccaggctgagtgtgacccctgaggtaaacactccactaagctgtgtcttgttcatgccccctgctcagtgaaaggtgagtcccgagaccagttgggtacctctctatgcgaaccagagacatttctggatccaggccaggtgaagattagggccaggaagcctgagcccccggggcctcaaggtagggagccgaagaggctgccaggactctgctgggttgaaatttgccggggaggactcttgtctccccctcaggagtatttttgttgaggctttcctggaggtgaagaagcaattcccattgcagcaggttagagcgagaatcagacagagggcaaaaaccaattcgcttctccccacgttctaaatgctggggcatggctgtcaggagggcttcctgggaggtgtctctgggggtggggtgaggttggggcgatggcctttggagattgcgtgtggtgttcaggactgttccttggtgtttgagggaaactttagtgggattgcagtggaatgtaaggtcagggcacgtgggtgctctctcggggtggggtgactgggagacctagagggaaagcctgctatgcagggggagagcacaggactggccctgctctgcggcctcctttgtcccataacctgaagttaagtcacatcccctgtcgggacctccgtgcactcatctgtcaagtgggggcgcttcccttccagcatcacctgcagcagacgggctctcgggagtcgtgggttccaggcagctgtgtggacccagggacagacattcaaagggacgccagccatccttagtgacaggggccccaacttagcatcccttcccttccgttaggaaggagatgaccggaagcaaccccttcacagacacgagcacatcggcaaaccctatgaaagtggaattttctaacaaaataaacttgcttgtttgatctgttttctgtaacttttgctaaatactttatacatttttcatgttaaagagccgtgtctcccgccagcactcctcaccccggtatgaatgtgtttcctccacattgtatatccttccaccctctggctgcctagatcagtaaataaaattgatgtaatataatttataagtaacactgttgaaaccctgatcccagtggaggctgtaacccacctgcccccgcaccacccccctgacccctgttaccgcatttgtgtgtattaatgctgaagaattaaatgtttaaagagtttaaattttgaaggcgtttgctatatacagttgtcctgcattattataaagagttttcaggaagtt

SEQ ID NO: 6976 - DNA, 1555 bp, Homo Sapiens
  NM_201440
attgcgcgcgccggaagtacctacctgggataacggcggcgagcggacggctgcatttacggggtctcccggagggccagagtcggaaattgttgaaaacgttaaatttgattcctaaaaggactcaatggcttacagaagagacgaaatgtggtctgagggacgatatgaatatgaaagaattccgagagaacgagcacctcctcgaagtcatcccagtgatgaatctggttatagatggacaagagacgatcattctgcaagcaggcaacctgaatacagggacatgagagatggctttagaagaaaaagtttctactcttcccattatgcgagagagcggtctccttataaaagggacaatacttttttcagagaatcacctgttggccgaaaggattctccacacagcagatctggttccagtgtcagtagcagaagctactctccagaaaggagcaaatcatactctttccatcagtctcaacatagaaagtccgtgcgtcctggtgcctcctacaaacggcagaatgaaggaaatcctgaaagagataaagagaggcctgtccagtctttgaaaacatcaagagatacttcaccctcaagtggttcagcagtttcttcatcaaaggtgttagacaaacccagtaggctaactgaaaaggaacttgctgaggctgcaagcaagtgggctgctgaaaagctagagaaatcagatgaaagtaacttgcctgaaatttctgagtatgaggcgggatccacagcaccattgtttactgaccagccagaggaacctgagtcaaacacaacacatgggatagaattatttgaagatagtcagctaaccactcgctctaaagcaatagcatcaaaaaccaaagagattgaacaggtttaccgacaagactgtgaaactttcgggatggtggtgaaaatgctgattgaaaaagatccttcattagaaaagtctatacagtttgcattgaggcagaatttacatgaaataggtgagcggtgtgttgaagaactcaagcatttcattgcagagtatgatacttccactcaagattttggagagcctttttagatttttctgctcaggctaaaaaaaaaaaaaaacagtttctaaaaattttttttcctggattgtgtaaatccttaatatatggaatttttgtgatgcagagaaatactttatgatagttgacaacatttcagtattaaataaacatctaaaatagtctgtttaaaatgtttgattcaaatttttgtattttttgtagagatggggttcaccatgttggccaggctagtctctaactcctggcctcaagtgatctgcctgcctcagcctctcaaagtgttgagattacaggcgtgagccaccgctccctgcccaacacatataccatctgaaaatgttagaattctgagttgtgattttattgacttgttgcttgctttttcttaggctttgtaacttgtaatatgttaaagtgtactatcctaataaactgaatactttggtatcttagagaataaaaaaaaaaaaaaa

SEQ ID NO: 6977 - DNA, 1739 bp, Homo Sapiens
  NM_201443
tttctttccgccgcccgcgttcccgccttggacctctgcgctccgacgcgctccgtcccgacctctggcttccctccgcgctccggcgctgctcgctgcccctctcccgcttccctcctgtccgccccgcgctcccctcctcgctcccggttgactcactcctccaggaatagggatccccgtgttttcccgtcagtcccattctgggaaaactcctccctccgcgcgctccgctccgctccgctgggcgcaccggggccggtcggcgcggggtgggcttggccccgcggccccgccttcactgcgccgcccgtcggccccggccggagcccggctctgcgcgctgacgccctgtcgtccccgcagaacgatcgccgcggccggaagagttggcgctcggggcggactccttggaactggcttagcgcacccatcccaccttcccgcaccctgggaccggtcggaacgagctgattgcccgctacatcaagctccggacagggaagacccgcaccaggaagcaggtctccagccacatccaggtgctggctcgtcgcaaagctcgcgagatccaggccaagctaaaggaccaggcagctaaggacaaggccctgcagagcatggctgccatgtcgtctgcacagatcatctccgccacggccttccacagtagcatggccctcgcccggggccccggccgcccagcagtctcagggttttggcaaggagctttgccaggccaagccggaacgtcccatgatgtgaagcctttctctcagcaaacctatgctgtccagcctccgctgcctctgccagggtttgagtctcctgcagggcccgccccatcgccctctgcgcccccggcacccccatggcagggccgcagcgtggccagctccaagctctggatgttggagttctctgccttcctggagcagcagcaggacccggacacgtacaacaagcacctgttcgtgcacattggccagtccagcccaagctacagcgacccctacctcgaagccgtggacatccgccaaatctatgacaaattcccggagaaaaagggtggactcaaggatctcttcgaacggggaccctccaatgccttttttcttgtgaagttctgggcagacctcaacaccaacatcgaggatgaaggcagctccttctatggggtctccagccagtatgagagccccgagaacatgatcatcacctgctccacgaaggtctgctctttcggcaagcaggtggtggagaaagttgagacagagtatgctcgctatgagaatggacactactcttaccgcatccaccggtccccgctctgtgagtacatgatcaacttcatccacaagctcaagcacctccctgagaagtacatgatgaacagcgtgctggagaacttcaccatcctgcaggtggtcaccaacagagacacacaggagaccttgctgtgcattgcctatgtctttgaggtgtcagccagtgagcacggggctcagcaccacatctacaggctggtgaaagaatgagagactcggggagcagggaggggggaagagacgtgtgtgcaggaaacggggacgtggggaggggacctgcaggggcagccccctgaagtgccaagagagctgagaggagcagttgtgactctacccaggaacaaactgtgcctgaacctgaggtgcccaaccccaaataaacccaagatgctgtgtattttcagaggaaaa

SEQ ID NO: 6978 - DNA, 1571 bp, Homo Sapiens
  NM_201446
ctgcaccaagctggccctgcacggctgcaagggaggctcctgtggacaggccaggcaggtgggcctcaggaggtgcctccaggcggccagtgggcctgaggccccagcaagggctagggtccatctccagtcccaggacacagcagcggccaccatggccacgcctgggctccagcagcatcagcccccaggaccggggaggcacaggtggcccccaccacccggaggagcagctcctgcccctgtccgggggatgactgattctcctccgccaggccacccagaggagaaggccaccccgcctggaggcacaggccatgaggggctctcaggaggtgctgctgatgtggcttctggtgttggcagtgggcggcacagagcacgcctaccggcccggccgtagggtgtgtgctgtccgggctcacggggaccctgtctccgagtcgttcgtgcagcgtgtgtaccagcccttcctcaccacctgcgacgggcaccgggcctgcagcacctaccgaaccatctataggaccgcctaccgccgcagccctgggctggcccctgccaggcctcgctacgcgtgctgccccggctggaagaggaccagcgggcttcctggggcctgtggagcagcaatatgccagccgccatgccggaacggagggagctgtgtccagcctggccgctgccgctgccctgcaggatggcggggtgacacttgccagtcagatgtggatgaatgcagtgctaggaggggcggctgtccccagcgctgcgtcaacaccgccggcagttactggtgccagtgttgggaggggcacagcctgtctgcagacggtacactctgtgtgcccaagggagggccccccagggtggcccccaacccgacaggagtggacagtgcaatgaaggaagaagtgcagaggctgcagtccagggtggacctgctggaggagaagctgcagctggtgctggccccactgcacagcctggcctcgcaggcactggagcatgggctcccggaccccggcagcctcctggtgcactccttccagcagctcggccgcatcgactccctgagcgagcagatttccttcctggaggagcagctggggtcctgctcctgcaagaaagactcgtgactgcccagcgccccaggctggactgagcccctcacgccgccctgcagcccccatgcccctgcccaacatgctgggggtccagaagccacctcggggtgactgagcggaaggccaggcagggccttcctcctcttcctcctccccttcctcgggaggctccccagaccctggcatgggatgggctgggatcttctctgtgaatccacccctggctacccccaccctggctaccccaacggcatcccaaggccaggtgggccctcagctgagggaaggtacgagctccctgctggagcctgggacccatggcacaggccaggcagcccggaggctgggtggggcctcagtgggggctgctgcctgacccccagcacaataaaaatgaaacgtgaaaaaaaaaaaaaaaaaaaaaaaaaaaaaaaaaaaaaaaaa

SEQ ID NO: 6979 - DNA, 2785 bp, Homo Sapiens
  NM_201520
ttactttcttactcttgggtcagttcctgctacagctatcccaccatggacttcttgatgagtggcctggcagcctgcggggcctgtgtattcaccaatcccctggaggtggtgaagaccaggatgcagttgcaaggagaactgcaggcccctggcacataccagcggcactaccgaaatgtcttccatgccttcatcaccatcggcaaggtggatggccttgctgccctgcagaaaggcctggcccccgccctcttgtaccagttcctgatgaatggcatccgactgggcacctatgggctggctgaggctgggggctacctgcacacagccgaaggcacccacagtcctgcccgcagcgcagcagctggggccatggctggggtcatgggagcctacttggggagccccatctacatggtgaagacacacctgcaggcacaggcagcctcagaaattgctgtagggcaccagtataagcatcagggcatgtttcaggcgctaaccgagattggccagaaacatggtctggtggggttatggcgtggggctctgggcggcctgccccgagttatcgtcggttcctccacccagctgtgcaccttctcatccaccaaggacctcctgagccagtgggagatctttcctccccagagctggaagttggcgctggtggctgccatgatgagtggcattgcagttgtcttggccatggcaccctttgatgtggcctgcacaaggctctacaaccagcccacagatgcacagggcaagaaccgagtccccaagttctcagcaacatcatgcagtgcttcagcgcctttactggggaccaaagatgttaggatcgtgaagggtcagactggtcaccagctgttcaaagtcacccaggctccagggtgcagcccgattctcctgggaacccagtcatgagatacccgcccgttccttcctccttacgggggctgattgaaggtaagcaagagatcagtctggtactggggcagcctcagcaaggcctgatgaagtgtcacgtcctttgctacctaaggggatcagagtcaggatgcttacctggatctctgcgtccccgctaccgcccttccaggacattacacactctcgggccctcacctgctggttttccttagctatctgctgcttgccagagaggacccaggcttcttgacagcggcccctcagggccaggttctccaaactgagaggctgaacagactccacatggacagccctagccccctgcacgccaccaacatcctcaaagtggtacctggagtagggaagcggggtcaggaagggacatctctggtcgcctccccgggagcatctttaagttgcaggcctggctcccggcccgtgcgtggtctcaccgcccggattaaccgtcggccgcgggccccgcccactggtccgaccccgcccctgccattggccagccgggggccattccctcaccgcgcagccgcttcgccccgtacgtgggcctgcagctcgagaagttccactatcaggctctggtccgtcacgggatggcagaaaacttcttgattgtccgggaccggtcggaggtcgctggagtgaggcgaggcagaccctggttgaccccggtctcttcccacaacccacccagtcagccgcccctgggcgccccggccttctcaccttacgtcaatggcccccatggggaggatggcggaaaaggcgcccccgaacagcgggcagtctctcgtgggctccatgggtctgaggctgggttatgggcattagaaaggtttaaaagaagtccacattgggtcacgtggcatcggctccctgggtttcgcagctgccaccgccacccgggtctggcttagctcccggatcctttaagatttggctccgccctgcgctctcgttggccaatcggcgccaagaccctgggggcgggggtcagcggctttgctccggaagccgcgctcttaggagtgcgcctggcgggacggtggggtctgccttggggttggacttagggttagggtctatgtcgcccccggtggtcacgagcatgctcccgccagcctcctcttgattgattgattgattgattgattgacaggtctcgctgtgtcgcccaggctgtaatgcagtggcgcgatcaccgctcactgcagtctccacctccaggactcaagtgatactcctgcctcagcctcttgagtggctcctgctcccgccaccacgcccggctaaatttttaattacttgtagaaatggggcggggtggggagtgtctcccaatcttgcccaggctggcctcaaactcctggactcaagcgatcctcccgcctcggctccctaagtgctggaattacaggcgagagccacagcgcctggcctcctcgtccttttcaagtggtcacaccttccaagaaggtcgcctgagaccctcctgaggggcaggtgctcgtcaaaggggcccacgtctaggtagggtctcttgagtcaggaaagcatagtttcacggtgttctgggcctctgaaagaagaatgggctgccacccagaccgctaattcatagatctgctgctgggaattaggggaacaatgcgtccaggttaggattcaggtctcacatcttcctgaaagtgagagccaacctgggtattagaaatctaattcctctcaaatatttgccttgggaatgctcccgggcaggtgcaaccccacccccagctccacacacctggacagaagcacagattaaaccctcttttgtttgtctttt

SEQ ID NO: 6980 - DNA, 3982 bp, Homo Sapiens
  NM_201524
gagaaatccatgactcacatatatcgtccgtcatccccagtcaagctcagggaggagggaggagcccagctggggcaggagaggggtgtctccccaccaaacaaacccggtccctccctctccgcactagctgtctgccctgccctgccgtaggagatgggctgggagcctcccacgctctccagctcactcggcaggcagcggggaccagggctggcaggttaagcctctgggggtggatcctgaaaggtggtccagccgcctggccctgcgtgggaccctccacctggcagcagacagggtctcgctctgtcacacaggctggagtgcagtggtgtgatcttggctcatcgtaacctccacctcccgggttcaagtgattctcatgcctcagcctcccgagtagctgggattacaggtggtgacttccaagagtgactccgtcggaggaaaatgactccccagtcgctgctgcagacgacactgttcctgctgagtctgctcttcctggtccaaggtgcccacggcaggggccacagggaagactttcgcttctgcagccagcggaaccagacacacaggagcagcctccactacaaacccacaccagacctgcgcatctccatcgagaactccgaagaggccctcacagtccatgcccctttccctgcagcccaccctgcttcccgatccttccctgaccccaggggcctctaccacttctgcctctactggaaccgacatgctgggagattacatcttctctatggcaagcgtgacttcttgctgagtgacaaagcctctagcctcctctgcttccagcaccaggaggagagcctggctcagggccccccgctgttagccacttctgtcacctcctggtggagccctcagaacatcagcctgcccagtgccgccagcttcaccttctccttccacagtcctccccacacggccgctcacaatgcctcggtggacatgtgcgagctcaaaagggacctccagctgctcagccagttcctgaagcatccccagaaggcctcaaggaggccctcggctgcccccgccagccagcagttgcagagcctggagtcgaaactgacctctgtgagattcatgggggacatggtgtccttcgaggaggaccggatcaacgccacggtgtggaagctccagcccacagccggcctccaggacctgcacatccactcccggcaggaggaggagcagagcgagatcatggagtactcggtgctgctgcctcgaacactcttccagaggacgaaaggccggagcggggaggctgagaagagactcctcctggtggacttcagcagccaagccctgttccaggacaagaattccagccaagtcctgggtgagaaggtcttggggattgtggtacagaacaccaaagtagccaacctcacggagcccgtggtgctcactttccagcaccagctacagccgaagaatgtgactctgcaatgtgtgttctgggttgaagaccccacattgagcagcccggggcattggagcagtgctgggtgtgagaccgtcaggagagaaacccaaacatcctgcttctgcaaccacttgacctactttgcagtgctgatggtctcctcggtggaggtggacgccgtgcacaagcactacctgagcctcctctcctacgtgggctgtgtcgtctctgccctggcctgccttgtcaccattgccgcctacctctgctccaggaggaaacctcgggactacaccatcaaggtgcacatgaacctgctgctggccgtcttcctgctggacacgagcttcctgctcagcgagccggtggccctgacaggctctgaggctggctgccgagccagtgccatcttcctgcacttctccctgctcacctgcctttcctggatgggcctcgaggggtacaacctctaccgactcgtggtggaggtctttggcacctatgtccctggctacctactcaagctgagcgccatgggctggggcttccccatctttctggtgacgctggtggccctggtggatgtggacaactatggccccatcatcttggctgtgcataggactccagagggcgtcatctacccttccatgtgctggatccgggactccctggtcagctacatcaccaacctgggcctcttcagcctggtgtttctgttcaacatggccatgctagccaccatggtggtgcagatcctgcggctgcgcccccacacccaaaagtggtcacatgtgctgacactgctgggcctcagcctggtccttggcctgccctgggccttgatcttcttctcctttgcttctggcaccttccagcttgtcgtcctctaccttttcagcatcatcacctccttccaaggcttcctcatcttcatctggtactggtccatgcggctgcaggcccggggtggcccctcccctctgaagagcaactcagacagcgccaggctccccatcagctcgggcagcacctcgtccagccgcatctaggcctccagcccacctgcccatgtgatgaagcagagattcggcctcgtcgcacactgcctgtggcccccgagcccggcccagccccaggccagtcagccgcagactttggaaagcccaacgaccatggagagatgggccgttgccatggtggacggactcccgggctgggcttttgaattggccttggggactactcggctctcactcagctcccacgggactcagaagtgcgccgccatgctgcctagggtactgtccccacatctgtcccaacccagctggaggcctggtctctccttacaacccctgggcccagccctcattgctgggggccaggccttggatcttgagggtctggcacatccttaatcctgtgcccctgcctgggacagaaatgtggctccagttgctctgtctctcgtggtcaccctgagggcactctgcatcctctgtcattttaacctcaggtggcacccagggcgaatggggcccagggcagaccttcagggccagagccctggcggaggagaggccctttgccaggagcacagcagcagctcgcctacctctgagcccaggccccctccctccctcagccccccagtcctccctccatcttccctggggttctcctcctctcccagggcctccttgctccttcgttcacagctgggggtccccgattccaatgctgttttttggggagtggtttccaggagctgcctggtgtctgctgtaaatgtttgtctactgcacaagcctcggcctgcccctgagccaggctcggtaccgatgcgtgggctgggctaggtccctctgtccatctgggcctttgtatgagctgcattgcccttgctcaccctgaccaagcacacgcctcagaggggccctcagcctctcctgaagccctcttgtggcaagaactgtggaccatgccagtcccgtctggtttccatcccaccactccaaggactgagactgacctcctctggtgacactggcctagggcctgacactctcctaagaggttctctccaagcccccaaatagctccaggcgccctcggccgcccatcatggttaattctgtccaacaaacacacacgggtagattgctggcctgttgtaggtggtagggacacagatgaccgacctggtcactcctcctgccaacattcagtctggtatgtgaggcgtgcgtgaagcaagaactcctggagctacagggacagggagccatcattcctgcctgggaatcctggaagacttcctgcaggagtcagcgttcaatcttgaccttgaagatgggaaggatgttctttttacgtaccaattcttttgtcttttgatattaaaaagaagtacatgttcattgtagagaatttggaaactgtagaagagaatcaagaagaaaaataaaaatcagctgttgtaatcacctagcaaactggaaaaaaaaaaaaaaa

SEQ ID NO: 6981 - DNA, 3860 bp, Homo Sapiens
  NM_201525
gagaaatccatgactcacatatatcgtccgtcatccccagtcaagctcagggaggagggaggagcccagctggggcaggagaggggtgtctccccaccaaacaaacccggtccctccctctccgcactagctgtctgccctgccctgccgtaggagatgggctgggagcctcccacgctctccagctcactcggcaggcagcggggaccagggctggcaggttaagcctctgggggtggatcctgaaaggtggtccagccgcctggccctgcgtgggaccctccacctggcagcaggtggtgacttccaagagtgactccgtcggaggaaaatgactccccagtcgctgctgcagacgacactgttcctgctgagtctgctcttcctggtccaaggtgcccacggcaggggccacagggaagactttcgcttctgcagccagcggaaccagacacacaggagcagcctccactacaaacccacaccagacctgcgcatctccatcgagaactccgaagaggccctcacagtccatgcccctttccctgcagcccaccctgcttcccgatccttccctgaccccaggggcctctaccacttctgcctctactggaaccgacatgctgggagattacatcttctctatggcaagcgtgacttcttgctgagtgacaaagcctctagcctcctctgcttccagcaccaggaggagagcctggctcagggccccccgctgttagccacttctgtcacctcctggtggagccctcagaacatcagcctgcccagtgccgccagcttcaccttctccttccacagtcctccccacacggccgctcacaatgcctcggtggacatgtgcgagctcaaaagggacctccagctgctcagccagttcctgaagcatccccagaaggcctcaaggaggccctcggctgcccccgccagccagcagttgcagagcctggagtcgaaactgacctctgtgagattcatgggggacatggtgtccttcgaggaggaccggatcaacgccacggtgtggaagctccagcccacagccggcctccaggacctgcacatccactcccggcaggaggaggagcagagcgagatcatggagtactcggtgctgctgcctcgaacactcttccagaggacgaaaggccggagcggggaggctgagaagagactcctcctggtggacttcagcagccaagccctgttccaggacaagaattccagccaagtcctgggtgagaaggtcttggggattgtggtacagaacaccaaagtagccaacctcacggagcccgtggtgctcactttccagcaccagctacagccgaagaatgtgactctgcaatgtgtgttctgggttgaagaccccacattgagcagcccggggcattggagcagtgctgggtgtgagaccgtcaggagagaaacccaaacatcctgcttctgcaaccacttgacctactttgcagtgctgatggtctcctcggtggaggtggacgccgtgcacaagcactacctgagcctcctctcctacgtgggctgtgtcgtctctgccctggcctgccttgtcaccattgccgcctacctctgctccaggaggaaacctcgggactacaccatcaaggtgcacatgaacctgctgctggccgtcttcctgctggacacgagcttcctgctcagcgagccggtggccctgacaggctctgaggctggctgccgagccagtgccatcttcctgcacttctccctgctcacctgcctttcctggatgggcctcgaggggtacaacctctaccgactcgtggtggaggtctttggcacctatgtccctggctacctactcaagctgagcgccatgggctggggcttccccatctttctggtgacgctggtggccctggtggatgtggacaactatggccccatcatcttggctgtgcataggactccagagggcgtcatctacccttccatgtgctggatccgggactccctggtcagctacatcaccaacctgggcctcttcagcctggtgtttctgttcaacatggccatgctagccaccatggtggtgcagatcctgcggctgcgcccccacacccaaaagtggtcacatgtgctgacactgctgggcctcagcctggtccttggcctgccctgggccttgatcttcttctcctttgcttctggcaccttccagcttgtcgtcctctaccttttcagcatcatcacctccttccaaggcttcctcatcttcatctggtactggtccatgcggctgcaggcccggggtggcccctcccctctgaagagcaactcagacagcgccaggctccccatcagctcgggcagcacctcgtccagccgcatctaggcctccagcccacctgcccatgtgatgaagcagagattcggcctcgtcgcacactgcctgtggcccccgagcccggcccagccccaggccagtcagccgcagactttggaaagcccaacgaccatggagagatgggccgttgccatggtggacggactcccgggctgggcttttgaattggccttggggactactcggctctcactcagctcccacgggactcagaagtgcgccgccatgctgcctagggtactgtccccacatctgtcccaacccagctggaggcctggtctctccttacaacccctgggcccagccctcattgctgggggccaggccttggatcttgagggtctggcacatccttaatcctgtgcccctgcctgggacagaaatgtggctccagttgctctgtctctcgtggtcaccctgagggcactctgcatcctctgtcattttaacctcaggtggcacccagggcgaatggggcccagggcagaccttcagggccagagccctggcggaggagaggccctttgccaggagcacagcagcagctcgcctacctctgagcccaggccccctccctccctcagccccccagtcctccctccatcttccctggggttctcctcctctcccagggcctccttgctccttcgttcacagctgggggtccccgattccaatgctgttttttggggagtggtttccaggagctgcctggtgtctgctgtaaatgtttgtctactgcacaagcctcggcctgcccctgagccaggctcggtaccgatgcgtgggctgggctaggtccctctgtccatctgggcctttgtatgagctgcattgcccttgctcaccctgaccaagcacacgcctcagaggggccctcagcctctcctgaagccctcttgtggcaagaactgtggaccatgccagtcccgtctggtttccatcccaccactccaaggactgagactgacctcctctggtgacactggcctagggcctgacactctcctaagaggttctctccaagcccccaaatagctccaggcgccctcggccgcccatcatggttaattctgtccaacaaacacacacgggtagattgctggcctgttgtaggtggtagggacacagatgaccgacctggtcactcctcctgccaacattcagtctggtatgtgaggcgtgcgtgaagcaagaactcctggagctacagggacagggagccatcattcctgcctgggaatcctggaagacttcctgcaggagtcagcgttcaatcttgaccttgaagatgggaaggatgttctttttacgtaccaattcttttgtcttttgatattaaaaagaagtacatgttcattgtagagaatttggaaactgtagaagagaatcaagaagaaaaataaaaatcagctgttgtaatcacctagcaaactggaaaaaaaaaaaaaaa

SEQ ID NO: 6982 - DNA, 2052 bp, Homo Sapiens
  NM_201539
gggtctgcgggaagcccgagccggggcgggcccgagtcaaaggcaagtgaaggtggaagcggccgcggcggcagcaggccaccatggcggagctgcaggaggtgcagatcacagaggagaagccactgttgccaggacagacgcctgaggcggccaaggaggctgagttagctgcccgaatcctcctggaccagggacagactcactctgtggagacaccatacggctctgtcactttcactgtctatggcacccccaaacccaaacgcccagcgatccttacctaccacgatgtgggactcaactataaatcttgcttccagccactgtttcagttcgaggacatgcaggaaatcattcagaactttgtgcgggttcatgtggatgcccctggaatggaagagggagcccctgtgttccctttgggatatcagtacccatctctggaccagcttgcagacatgatcccttgcgtcctgcagtacctaaatttctctacaataattggagttggtgttggagctggagcctacatcctggcgagatatgctcttaaccacccggacactgttgaaggtcttgtcctcatcaacattgatcccaatgccaagggttggatggattgggcagcccacaagctaacaggcctcacctcttccattccggagatgatccttggacatcttttcagccaggaagagctctctggaaattctgagttgatacaaaagtacagaaatatcattacacatgcacccaacctggataacattgaattgtactggaacagctacaacaaccgccgagacctgaactttgagcgtggaggtgatatcaccctcaggtgtcctgtgatgctggtggtaggagaccaagcacctcatgaagatgcagtggtggaatgtaactcaaaactggaccccacccagacctcgttcctcaagatggctgactccggaggtcagccccagctgactcagccaggcaagctgaccgaggccttcaagtacttcctgcaaggcatgggctacatggcctcatcctgcatgactcgcctgtcccggtctcgtacagcctctctgaccagtgcagcatccgttgatggcaaccggtcccgctctcgcaccctgtcccagagcagcgagtctggaactctttcttcggggcccccggggcacaccatggaggtctcctgttgaatggcccttgttgccctagagtgggacccagccctcacctcccccagagctaacctgggaggtgctgaaggggcattgggccaccgtaagcaagggaaaaagggcagatcatgcggggagatgaccttgatctttgattgctaccctaaccttgacctttaacccgtgattccccccagctcctggaagagatgtcctaatatctcttagggacccagacccctaaattctcctcctcccccattttgatgttaaggtggagagggcatatgcatcctctgtcctgatctaggtgtctatagctgaggggtaagaggttgttgtagttgtcctggtgcctccatcagactctccctacttgtcccatatttgcaaggggaggggatttggggctggggctccattcaccaaagctgaggtggcttctcattaaccctttaggactctgaagggtatggacctacgtgaatgtgtgtcagggggagacttgctggtgggttagtggtcctcaggatgtgatagaaacatccagtgtaaaaaggaagttggaatgggagttggcgggcagtgaacgagtgtggggaaggattggtgctggggcaacaggaaggggcctggggccgtttggctgcactaactttggtagctcagtgtgcatctagagtgggactggggagggagctaagcttgggctgggctgcttggggcttggcatagggtggaaagggctaccctggggctctgaccacactgtagtatgtgtggagggtgccctcccgtctcccacaacttctgctataacaataaactgtagaggaatctgagtaccgttaaaaaaaaaaaaaaaaaaaaa

SEQ ID NO: 6983 - DNA, 6151 bp, Homo Sapiens
  NM_201545
atagttctagaagcttgtttctcccacctgaaaagactggatttgggacatgatcctgtagaacttcggagattggggaagataatcggaagaggtagaagacaccgtccatgacacttcctggggaagcagatgtatgtataaggatggccagtgcctcagtttcaatccaggtaacctttaaatgaaacttgcctaaaatcttaggtcatacacagaagagactccaatcgacaagaagctggaaaagaatgatgttgtccttaaacaacctacagaatatcatctataacccggtaatcccgtttgttggcaccattcctgatcagctggatcctggaactttgattgtgatacgtgggcatgttcctagtgacgcagacagattccaggtggatctgcagaatggcagcagcatgaaacctcgagccgatgtggcctttcatttcaatcctcgtttcaaaagggccggctgcattgtttgcaatactttgataaatgaaaaatggggacgggaagagatcacctatgacacgcctttcaaaagagaaaagtcttttgagatcgtgattatggtgctgaaggacaaattccaggtggctgtaaatggaaaacatactctgctctatggccacaggatcggcccagagaaaatagacactctgggcatttatggcaaagtgaatattcactcaattggttttagcttcagctcggacttacaaagtacccaagcatctagtctggaactgacagagataagtagagaaaatgttccaaagtctggcacgccccagcttcctagtaatagaggaggagacatttctaaaatcgcacccagaactgtctacaccaagagcaaagattcgactgtcaatcacactttgacttgcaccaaaataccacctatgaactatgtgtcaaagaggctgccattcgctgcaaggttgaacacccccatgggccctggacgaactgtcgtcgttaaaggagaagtgaatgcaaatgccaaaagctttaatgttgacctactagcaggaaaatcaaaggatattgctctacacttgaacccacgcctgaatattaaagcatttgtaagaaattcttttcttcaggagtcctggggagaagaagagagaaatattacctctttcccatttagtcctgggatgtactttgagatgataatttattgtgatgttagagaattcaaggttgcagtaaatggcgtacacagcctggagtacaaacacagatttaaagagctcagcagtattgacacgctggaaattaatggagacatccacttactggaagtaaggagctggtagcctacctacacagctgctacaaaaaccaaaatacagaatggcttctgtgatactggccttgctgaaacgcatctcactgtcattctattgtttatattgttaaaatgagcttgtgcaccattaggtcctgctgggtgttctcagtccttgccatgaagtatggtggtgtctagcactgaatggggaaactgggggcagcaacacttatagccagttaaagccactctgccctctctcctactttggctgactcttcaagaatgccattcaacaagtatttatggagtacctactataatacagtagctaacatgtattgagcacagattttttttggtaaaactgtgaagagctaggatatatacttggtgaaacaaaccagtatgttccctgttctcttgagcttcgactcttctgtgcgctactgctgcgcactgctttttctacaggcattacatcaactcctaaggggtcctctgggattagttatgcagatattaaatcacccgaagacactaacttacagaagacacaactccttccccagtgatcactgtcataaccagtgctctaccgtatcccatcactgaggactgatgttgactgacatcattttctttatcgtaataaacatgtggctctattagctgcaagctttaccaagtaattggcatgacatctgagcacagaaattaaggcaaaaaaccaaagcaaaacaaatacatggtgctgaaattaacttgatgccaagcccaaggcagctgatttctgtgtatttgaacttagggcaaatcagagtctacacagacgcctacagaaagtttcaggaagaggcaagatgcattcaatttgaaagatatttatgggcaacaaagtaaggtcaggattagacttcaggcattcataaggcaggcactatcagaaagtgtacgccaactaagggacccacaaagcaggcagaggtaatgcagaaatctgttttgttcccatgaaatcaccaatcaaggcctccgttcttctaaagattagtccatcatcattagcaactgagatcaaagcactcttccactttacgtgattaaaatcaaacctgtatcagcaagttaaatggttccatttctgtgatttttctattatttgaggggagttggcagaagttccatgtatatgggatctttacaggtcagatcttgttacaggaaatttcaaaggtttgggagtggggagggaaaaaagctcagtcagtgaggatcattttatcacattagactggggcagaactctgccaggatttaggaatattttcagaacagattttagatattatttctatccatatattgaaaagaataccattgtcaatcttatttttttaaaagtactcagtgtagaaatcgctagcccttaattcttttccagcttttcatattaatgtatgcagagtctcaccaagctcaaagacactggttgggggtggagggtgccacagggaaagctgtagaaggcaagaagactcgagaatcccccagagttatttttctccataaagaccatcagagtgcttaactgagctgttggagactgtgaggcatttaggaaaaaaatagcccactcacatcattccttgtaagtcttaagttcattttcattttacgtggaggaaaaaaatttaaaaagctattagtatttattaatgaattttactgagacatttcttagaaatatgcacttctatactagcaagctctgtctctaaaatgcaagttggccttttgcttgccacatttctgcattaaacttctatattagcttcaaaggcttttaaactcaatgcgaacattctacgggatgttcttagatgcctttaaaaagggggcagatctaattttatttgaaccctcactttccaacttcaccatgacccagtactagagattagggcacttcaaagcattgaaaaaaatctactgatacttactttcttagacaagtagttcttagttaaccaccaatggaactgggttcattctgaatcctggaggagcttcctcgtgccacccagtgtttctgggccctctgtgtgagcagccaggtgtgagctgttttagaagcagcgtgttgccttcatctctcccgtttcccaaaagaacaaaggataaaggtgacagtcacactcctgggttaaaaaaagcattccagaaccacttctctttatgggcacaacaaagaaacgaaggctgaagttcgcctacccaaaatgaaaagtaggctttacagtcaaaagtacttctgttgattgctaaataacttcattttcttgaaatagagcaactttgagtgaaatctgcaacatggataccatgtatgtaagatactgctgtacagaagagttaaggcttacagtgcaaatgaggcgtcagctttgggtgctaaaattaacaagtctaatattattaccatcaatcaggaagagaataataaatgtttaaacaaacacagcagtctgtataaaaataccgtgtatcatttactctttctgcagctctatacgataggcaggagaggcttatgtggcagcacaagccaggtggggattttgtaaagaagtgataaaacatttgtaagtaatccaagtaggtgtattaaggcaccaaaagtaacatggcacccaacacccaaaaataaaaatatgaaatatgagtgtgaactctgagtagagtatgaaacaccacagaaagtcttagaaatagctctggagtggctctcccaggacagtttccagttgctgaatagtcttttggcactgatgttctacttcttcacattcatctaaaaaaaaaaaaaaaaaatcaaaattaaaatctgagtcagtccgcctgcctcggttctcattagtttaattcttaatgccttgcactttccggcaatcattcaatcaaaagagtgaaatgaagcacattaacaaagcaggaggcgccacggaccgcctccctccacaccgctccttccgccttcattccttgcccacaggcttgcactggaagctgaataagaatccccaaaactcaaacttcctagggatgccacccctttagtagctcacacctcccccctccaagagctaagaaacaaaggagaatgtacttttgtagcttagataagcaatgaatcagtaaaggactgatctacttgctccaccacccctcccttaataataacatttactgttatttcctgggcctaagactctatgttccagaactgtcacagctccccatgtcacactcactagcttgtgatctttgtcaaataactgaaatcttttaagcctctagtttcttcctttgtaaaacagagataaaatgttgtggtttttaagtgagataatccaagtaaagcacctaacatggagtagtgaatgaacatcggttgctactaaaagtggacatcctactgcatccttaatgccactaggcatttccatacaatctggggaccaaaacttcaatcatataaatgtatgaggttaattaaaaacactactgtaatctgcttgtatgatcacaaaccaccacaaaagaaaagatcgtgaagattacactgtaaacggactctcaaatgatcaggaggtggtcacttcgcaacttgctccctccacccaactcaaaacaggagctcgagcctgcctgtatttgagactggagctgcctgtatgaggactggatcaactgctagtcacgttatatccaaatctgcattatcattgggcacattttcacagaattttactgaattattccttaattgtttaatggttgggaatagtttgggaattaccttccatcaactctgctaagaaaggaatggattctggtagcaagacaatataattctcctttagtttttcagccagtgctaacacagtaatcaaagcagcaaatcgaacctgaaagggataaaagagcaaagaaataaaaagtagtgttactgtatttattatcttaagagctgtactgacttgagacaagctctaactttttaaacattagttcacatgcgtttattcacttcattatgttcattaagctttcatcttagaataccagtttcaccatttgggagctgtttgtaatatgtgcaaccttataaatagtgttttccaaactgtgtcccaggactgcaaatctttaatgtgaaatgtctttttataatctcttcctttaaaaaaaaccaataaaataaaatgccgcatgcaaactcaagtgtgtcaccagattttacttcattggcgctcgccagcccgccaggctggcaataaagtgcctccagccacctctggcaggtctcctcacccacagcccctgactggtcaccactataattgtatgaggggccaggacagtcgcttgggataaactcccatctcagcactgaataaaaaacattctgtgtcacaatatcctagttttggggctttaaaaacgtctaggtgttcctcacatgccttgtctataataaggaaagcaagcagtagttgggtattgttagcttttgaaacaaaagccctactggtcttctaattttggatattttaattaaagaatatctggacagtacaaagtgaattattaaaaaaccatttgtaactacctagattcaatcaggatttccttgatttgtgcaaagtaaaatattacaataaatttgatactgctacttgtataaaaacctatggtttaaaatgtgggggttcatcataatagtctcattgttagcatatcctaataaagaatttgaactaataaatcctattaataaaa

SEQ ID NO: 6984 - DNA, 3226 bp, Homo Sapiens
  NM_201548
gcagcgctggacgcggctagagctggggctgccgcgccctccacctccttctccaaaggcctccccggacccctggctcgggcccagcctgcgactccgccatgccctggaggaggcgcaggaaccgggtgagtgccctggagggcggccgggaggaagaggcgcccccggaggctgccgctgtgcctccggcgctgttaacgtccccgcagcagacggaggcggcggccgagcggattctgctccggggcatcttcgagatcgggagggacagttgtgacgtggtgctgagcgagcgagcactgcggtggcggcccattcagcccgagcgcccggcgggtgattctaagtatgacttgctatgtaaagaagaatttattgaactcaaagacatattctctgtgaaactgaaacggcgttgttctgttaaacagcagagaagtggtactttattaggtatcacactcttcatctgcttgaaaaaggaacaaaataaactaaagaattctacacttgatcttattaatttaagtgaagaccactgtgacatatggtttagacagttcaagaaaatattggcaggctttccaaacagaccgaagtcattaaaaatactccttaacccccaaagtcacaaaaaagaagctacccaggtttattatgagaaggttgaacctctgttgaagcttgcaggaataaaaactgatgtaacaataatggaatatgaagggcacgctctgtcactgcttaaggaatgtgaactccagggatttgatggtgttgtctgtgttggtggagatggatctgctagcgaagtagcccatgctttgcttctgagagctcagaagaatgctgggatggaaacagaccgaatcctgactcctgtcagagcacagcttccacttggcttaataccagcaggatctaccaatgtattggcacattctcttcatggagttcctcatgtgataactgcaacattgcacattataatggggcatgtacagctggtcgacgtctgcaccttcagcaccgctggcaagcttcttcgctttgggttctcagccatgtttggctttggtggaagaactttggctctggcagaaaaatatcgatggatgtcccctaaccaacggagagattttgctgttgttaaggcactggcaaaacttaaggcagaagactgtgaaatatcatttttaccatttaacagctctgatgatgtgcaagaaaggagggcacagggatctcccaaatctgactgtaatgatcaatggcaaatgatccagggtcagttcttgaatgtcagcattatggcaattccttgcctgtgttcagtggcacctagaggcttggcacctaataccagattaaataatggaagtatggctcttataattgcccgaaacacttctcggccagaatttataaaacacctgaaaagatatgccagtgtaaaaaatcagttcaattttccatttgttgagacttacactgttgaggaagtaaaagttcatccaaggaataatactggtggatataatccagaggaggaggaggatgaaactgcttcagaaaattgtttcccttggaatgtagatggtgacttaatggaagttgcatcagaggtccatattagattgcatccaagacttatcagtctttatggaggaagcatggaagaaatgattccaaagtaacatgtaattgtttctaaaagaaatgtacaaactagaattttaatataaagaaatgtggccatgctttaaacctgtggtccccaccctttttgggaccagtttcatggaagacaatttttccgtggatgggggaatggtttcaggatgaactgttccacctcagatcatcaggcattagattctcttgaggaacatggcactctagatccctcacataccagttcaccatatggttcgcacttctatgagaatctaatgctgctgctgatctgacagggggaggaactcagtaatgctccattgctctaacctcctgctgtgtggccaaacggatatcctaatagaaattgatgttactaacaattagcctctagggctttaaaagtcaagatgaaatatcaattcaaattctgtttttagatatcaattcaaattcttttttttacaatgtgtttattggacacacaaaaaaactttgcaaccatcataatacatcaatatttaacctagataattctgaaataatttggattctttcatttttcaggatttgagctcatcaattatgttaaatttcctatattctgttacaaatataatacagatttcataagtctgccttgattcactgctccctaatccagagcagttaaatttcaaaatcacatagttatatagcctacctgccaaaaaagaataacccatccctgtcttcttaaagtggtagggttttaaaattcatgatacaagtaacaaagtaagttgataacaaatactattttgaactgggcaaaatctagcccaatatgtaattgtgttccccttgtatctgagaggcctgtgttggacaaccatagtactctgctttcactgtgctcagataacctgaaatatatagttgtttctgagtagttctgagtaggaaagaaccaaatgtaaatttccttagagaccatcctggagaagacagttctaaatcggggcttgatttttcatctatgatcctagatgttctcctgaaagaatgactagcctttttataacgatacaaagttttttaaaaatacataaatgtcataaagtttattcctgtgtatacacactctgggttcaggaggttttgtgcttacatttcactactcaaatgccttcgcaaatctcagaacattcctcaccatcactgcaggcctgtgaacagataactttcatcaattaggatggctggctagtggcagggacttcatataaagaaatctttcccagaattgtttttccacattgccttctaatttgatcactccctataacagatgttcaaaattcggccacagctctcttatgaaggcagagtcagataaaatgatattctgcaattatctagatcataagcataaaataaatattacaaaaatgattgtatttaaagaaattttttaaaatccagaaagtcatttaaaatagaacctcatatagtatgaacaaactataaaaatattttacatttcatgaaaaaaaaaaaaaaaaaa

SEQ ID NO: 6985 - DNA, 2669 bp, Homo Sapiens
  NM_201554
gcggccgcgtctgcctggcccgtcccctccagcccagctcgggctccagctccagcgccggcgcttcagctgcgaccgcgagccctctcaagcaaggcctaccctctgaagaggtccaagcaacggaagtactactacgaagctgcctttctggccatccttgagaaaaatagacagatggccaaggagaggggcctaataagccccagtgattttgcccagctgcaaaaatacatggaatactccaccaaaaaggtcagtgatgtcctaaagctcttcgaggatggcgagatggctaaatatgtccaaggagatgccattgggtacgagggattccagcaattcctgaaaatctatctcgaagtggataatgttcccagacacctaagcctggcactgtttcaatcctttgagactggtcactgcttaaatgagacaaatgtgacaaaagatgtggtgtgtctcaatgatgtttcctgctacttttcccttctggagggtggtcggccagaagacaagttagaattcaccttcaagctgtacgacacggacagaaatgggatcctggacagctcagaagtggacaaaattatcctacagatgatgcgagtggctgaatacctggattgggatgtgtctgagctgaggccgattcttcaggagatgatgaaagagattgactatgatggcagtggctctgtctctcaagctgagtgggtccgggctggggccaccaccgtgccactgctagtgctgctgggtctggagatgactctgaaggacgacggacagcacatgtggaggcccaagaggttccccagaccagtctactgcaatctgtgcgagtcaagcattggtcttggcaaacagggactgagctgtaacctctgtaagtacactgttcacgaccagtgtgccatgaaagccctgccttgtgaagtcagcacctatgccaagtctcggaaggacattggtgtccaatcacatgtgtgggtgcgaggaggctgtgagtccgggcgctgcgaccgctgtcagaaaaagatccggatctaccacagtctgaccgggctgcattgtgtatggtgccacctagagatccacgatgactgcctgcaagcggtgggccatgagtgtgactgtgggctgctccgggatcacatcctgcctccatcttccatctatcccagtgtcctggcctctggaccggatcgtaaaaatagcaaaacaagccagaagaccatggatgatttaaatttgagcacctctgaggctctgcggattgaccctgttcctaacacccacccacttctcgtctttgtcaatcctaagagtggcgggaagcaggggcaaagggtgctctggaagttccagtatatattaaaccctcgacaggtgttcaacctcctaaaggatggtcctgagatagggctccgattattcaaggatgttcctgatagccggattttggtgtgtggtggagacggcacagtaggctggattctagagaccattgacaaagctaacttgccagttttgcctcctgttgctgtgttgcccctgggtactggaaatgatctggctcgatgcctaagatggggaggaggttatgaaggacagaatctggcaaagatcctcaaggatttagagatgagtaaagtggtacatatggatcgatggtctgtggaggtgatacctcaacaaactgaagaaaaaagtgacccagtcccctttcaaatcatcaataactacttctctattggcgtggatgcctctattgctcatcgattccacatcatgcgagagaaatatccggagaagttcaacagcagaatgaagaacaagctatggtacttcgaatttgccacatctgaatccatcttctcaacatgcaaaaagctggaggagtctttgacagttgagatctgtgggaaaccgctggatctgagcaacctgtccctagaaggcatcgcagtgctaaacatccctagcatgcatggtggctccaacctctggggtgataccaggagaccccatggggatatctatgggatcaaccaggccttaggtgctacagctaaagtcatcaccgaccctgatatcctgaaaacctgtgtaccagacctaagtgacaagagactggaagtggttgggctggagggtgcaattgagatgggccaaatctataccaagctcaagaatgctggacgtcggctggccaagtgctctgagatcaccttccacaccacaaaaacccttcccatgcaaattgacggagaaccctggatgcagacgccctgtacaatcaagatcacccacaagaaccagatgcccatgctcatgggcccacccccccgctccaccaatttctttggcttcttgagctaagggggacacccttggcctccaagccagccttgaacccacctccctgtccctggactctactcccgaggctctgtacattgctgccacatactcctgccagcttgggggagtgttccttcaccctcacagtatttattatcctgcaccacctcactgttccccatgcgcacacacatacacacaccccaaaacacatacattgaaagtgcctcatctgaataaaatgacttgtgtttcccctttgggatctgctaaaaaaaaaaaaaaaaaaaaaaaaaaaaaaa

SEQ ID NO: 6986 - DNA, 1907 bp, Homo Sapiens
  NM_201555
agggtacgggccgggaccgccgcagcccggggcgggggcacggcaaccgcgaggcctgggggcgcccgccccccgcgccccacgcccggtgccagcgagccgaggcgtgcatctccttatatggtcaaatgacacggcggggtttctcgagggcgggagctgcgcagcgctccactcggccggcagcggagccgcagccaccagccgcccgcgccctccagccccgtccgggagtccccggcccgctgcggtgccgtgagtacctccaaccccctgcgccccggagggaggccgaggggcttagccaccagggctcggaagtgggggccgaatccggtgcgagacccaaggagaggggagcagagccggagttggggagactgtggctgagaactgtgtcttcctggagactaggctggcattttgactttgggacggagtctcgctttgtcgcccaggctggagtgcagtggcacgatctcagctcactgcaagctctacctcttggttcacgccattctcctgccccagcctcccaagtagctgggactacaggttgctgaaaagccaggagtcaaaatgactgagcgctttgactgccaccattgcaacgaatctctctttggcaagaagtacatcctgcgggaggagagcccctactgcgtggtgtgctttgagaccctgttcgccaacacctgcgaggagtgtgggaagcccatcggctgtgactgcaaggacttgtcttacaaggaccggcactggcatgaagcctgtttccactgctcgcagtgcagaaactcactggtggacaagccctttgctgccaaggaggaccagctgctctgtacagactgctattccaacgagtactcatccaagtgccaggaatgcaagaagaccatcatgccaggtacccgcaagatggagtacaagggcagcagctggcatgagacctgcttcatctgccaccgctgccagcagccaattggaaccaagagtttcatccccaaagacaatcagaatttctgtgtgccctgctatgagaaacaacatgccatgcagtgcgttcagtgcaaaaagcccatcaccacgggaggggtcacttaccgggagcagccctggcacaaggagtgcttcgtgtgcaccgcctgcaggaagcagctgtctgggcagcgcttcacagctcgcgatgactttgcctactgcctgaactgcttctgtgacttgtatgccaagaagtgtgctgggtgcaccaaccccatcagcggacttggtggcacaaaatacatctcctttgaggaacggcagtggcataacgactgctttaactgtaagaagtgctccctctcactggtggggcgtggcttcctcacagagagggacgacatcctgtgccccgactgtgggaaagacatctgaattcaacacagagaagttgctgcttgtgatctcacacacagatttttatgttttctttctcacccaggcaatcttgccttctggtttcttccagccacattgagactttcttctagtgcttttcagtgatactcacgtttgcttaaaccctttagtgctttgtgatagttcagtcccagggaaagagaaaactcgccctaggccctaggtgggaagatggtttgaaatttttgtaatcgagtaaggcacacccaaatgtaaaaatccttttgaatgatgcctttataaatctttctctcactgtctatttaagtgcaattaacatatgtcacgaacttgaaagttttctaaactcaataaggtaatgaccagttgttatttacagctctgtaacctcccgttgcgtcaagtctaaaccaagattatgtgacttgcaataaagttattcagaacagaaaaaaaaaaaaaaaaaaaaaaaaaaaaaaaaa

SEQ ID NO: 6987 - DNA, 1727 bp, Homo Sapiens
  NM_201557
aaagtgaggtccctttctggtgctggtggccttcccagtttagccaccctttggattcctggaaaatatgaggcctcgtgtgtccttgaagcaggcaggacaaacgaggacatggcagccccttcccatctgggagctgaggcttctttaatctggagaccttaaaaggcacgtgggagccaggggctgggttcttatctcctaggcctggccaatgtccagacgtgccttatttatagcgccactgacaagggcagcgcagctggctggcagctgcacagaaggttggggccatccaaccaggcagtccgcctgcacagcagctgtccctgctcatcgggctggaggacagaagacagaaccctaaaaccacaggttgctgaaaagccaggagtcaaaatgactgagcgctttgactgccaccattgcaacgaatctctctttggcaagaagtacatcctgcgggaggagagcccctactgcgtggtgtgctttgagaccctgttcgccaacacctgcgaggagtgtgggaagcccatcggctgtgactgcaaggacttgtcttacaaggaccggcactggcatgaagcctgtttccactgctcgcagtgcagaaactcactggtggacaagccctttgctgccaaggaggaccagctgctctgtacagactgctattccaacgagtactcatccaagtgccaggaatgcaagaagaccatcatgccaggtacccgcaagatggagtacaagggcagcagctggcatgagacctgcttcatctgccaccgctgccagcagccaattggaaccaagagtttcatccccaaagacaatcagaatttctgtgtgccctgctatgagaaacaacatgccatgcagtgcgttcagtgcaaaaagcccatcaccacgggaggggtcacttaccgggagcagccctggcacaaggagtgcttcgtgtgcaccgcctgcaggaagcagctgtctgggcagcgcttcacagctcgcgatgactttgcctactgcctgaactgcttctgtgacttgtatgccaagaagtgtgctgggtgcaccaaccccatcagcggacttggtggcacaaaatacatctcctttgaggaacggcagtggcataacgactgctttaactgtaagaagtgctccctctcactggtggggcgtggcttcctcacagagagggacgacatcctgtgccccgactgtgggaaagacatctgaattcaacacagagaagttgctgcttgtgatctcacacacagatttttatgttttctttctcacccaggcaatcttgccttctggtttcttccagccacattgagactttcttctagtgcttttcagtgatactcacgtttgcttaaaccctttagtgctttgtgatagttcagtcccagggaaagagaaaactcgccctaggccctaggtgggaagatggtttgaaatttttgtaatcgagtaaggcacacccaaatgtaaaaatccttttgaatgatgcctttataaatctttctctcactgtctatttaagtgcaattaacatatgtcacgaacttgaaagttttctaaactcaataaggtaatgaccagttgttatttacagctctgtaacctcccgttgcgtcaagtctaaaccaagattatgtgacttgcaataaagttattcagaacagaaaaaaaaaaaaaaaaaaaaaaaaaaaaaaaaa

SEQ ID NO: 6988 - DNA, 7314 bp, Homo Sapiens
  NM_201559
ctgctcgtggaagggaggaggaggaatgtggaaggtggcggcgcgcgagctgacaggcggttcctcgggcgggctgcggcgacggcccgagcgcttctccttcgccgaggttgcgcgccccctcctcgccgtgccccgggcccgcgcgggatcgtgcgtcgtcccgccgcgtccctgaagggaaggaagcgaggcggcggcggcggcgcccgggagccggagccttcgcggcgtccacgtccctcccccgctgcaccccgccccggcgcgagaggagagcgcgagagccccagccgcgggcgggcgggcggcgaagatggcagaggcaccggcttccccggccccgctctctccgctcgaagtggagctggacccggagttcgagccccagagccgtccgcgatcctgtacgtggcccctgcaaaggccggagctccaagcgagccctgccaagccctcgggggagacggccgccgactccatgatccccgaggaggaggacgatgaagacgacgaggacggcgggggacgggccggctcggccatggcgatcggcggcggcggcgggagcggcacgctgggctccgggctgctccttgaggactcggcccgggtgctggcacccggagggcaagaccccgggtctgggccagccaccgcggcgggcgggctgagcgggggtacacaggcgctgctgcagcctcagcaaccgctgccaccgccgcagccgggggcggctgggggctccgggcagccgaggaaatgttcgtcgcggcggaacgcctggggaaacctgtcctacgcggacctgatcacccgcgccatcgagagctccccggacaaacggctcactctgtcccagatctacgagtggatggtgcgttgcgtgccctacttcaaggataagggcgacagcaacagctctgccggctggaagaactccatccggcacaacctgtcactgcatagtcgattcatgcgggtccagaatgagggaactggcaagagctcttggtggatcatcaaccctgatggggggaagagcggaaaagccccccggcggcgggctgtctccatggacaatagcaacaagtataccaagagccgtggccgcgcagccaagaagaaggcagccctgcagacagcccccgaatcagctgacgacagtccctcccagctctccaagtggcctggcagccccacgtcacgcagcagtgatgagctggatgcgtggacggacttccgttcacgcaccaattctaacgccagcacagtcagtggccgcctgtcgcccatcatggcaagcacagagttggatgaagtccaggacgatgatgcgcctctctcgcccatgctctacagcagctcagccagcctgtcaccttcagtaagcaagccgtgcacggtggaactgccacggctgactgatatggcaggcaccatgaatctgaatgatgggctgactgaaaacctcatggacgacctgctggataacatcacgctcccgccatcccagccatcgcccactgggggactcatgcagcggagctctagcttcccgtataccaccaagggctcgggcctgggctccccaaccagctcctttaacagcacggtgttcggaccttcatctctgaactccctacgccagtctcccatgcagaccatccaagagaacaagccagctaccttctcttccatgtcacactatggtaaccagacactccaggacctgctcacttcggactcacttagccacagcgatgtcatgatgacacagtcggaccccttgatgtctcaggccagcaccgctgtgtctgcccagaattcccgccggaacgtgatgcttcgcaatgatccgatgatgtcctttgctgcccagcctaaccagggaagtttggtcaatcagaacttgctccaccaccagcaccaaacccagggcgctcttggtggcagccgtgccttgtcgaattctgtcagcaacatgggcttgagtgagtccagcagccttgggtcagccaaacaccagcagcagtctcctgtcagccagtctatgcaaaccctctcggactctctctcaggctcctccttgtactcaactagtgcaaacctgcccgtcatgggccatgagaagttccccagcgacttggacctggacatgttcaatgggagcttggaatgtgacatggagtccattatccgtagtgaactcatggatgctgatgggttggattttaactttgattccctcatctccacacagaatgttgttggtttgaacgtggggaacttcactggtgctaagcaggcctcatctcagagctgggtgccaggctgaaggatcactgaggaaggggaagtgggcaaagcagaccctcaaactgacacaagacctacagagaaaaccctttgccaaatctgctctcagcaagtggacagtgataccgtttacagcttaacacctttgtgaatcccacgccattttcctaacccagcagagactgttaatggccccttaccctgggtgaagcacttacccttggaacagaactctaaaaagtatgcaaaatcttccttgtacagggtggtgagccgcctgccagtggaggacagcacccctcagcaccacccaccctcattcagagcacaccgtgagcccccgtcggccattctgtggtgttttaatattgcgatggtttatgggacgttttaagtgttgttcttgtgtttgttttcctttgactttctgagtttttcacatgcattaacttgcggtatttttctgttaaaatgttaaccgtccttcccctagcaaatttaaaaacagaaagaaaatgttgtaccagttaccattccgggttcgagcatcacaagcttttgagcgcatggaactccataaactaacaaattacataaactaaagggggattttctttcttcttttgtttggtagaaaattatccttttctaaaaactgaacaatggcacaattgtttgctatgtgcacccgtccaggacagaaccgtgcataggcaaaaggagtggagcacagcgtccggcccagtgtgtttccggttctgagtcagggtgatctgtggacgggaccccagcaccaagtctacgggtgccagatcagtagggcctgtgatttcctgtcagtgtcctcagctaatgtgaacagtgttggtctgctggttagaaactagaatattgatattttcaggaaagaaatcagctcagctctccactcattgccaaatgtcactaaagggtttagttttaaggagaaagaaaaggaaaaaaaaaaaaaacaaaaaagtcctgttttgctttgcagaacaaatgaacttacaggtgagcattaagcttgcagtgagaaatgtgcgaagagtaaaaacccaagtcaatgctgaggcagttctaacttcactgttttcctaaatacacatccttgattattttcagccttgctatataatctgatctgctagaagtgtatgagtgagaggcaatagcatacaaactgattttttaaatataagcttaggttgtaattgtacaagtgactcaatggaagtacaaaatagggcagttttaacttttttttctgcttctatggatttcattttgttgtgttttcaaaaagttatggtgctgtataggtgctttctgtttaacctggaaagtgtgattatattcgttaccttctttggtagacggaatagttgggaccacctttggtacataagaaattggtataacgatgctctgattagcacagtatatgcatacttctccaaagtgatatatgaagactcttttctttgcataaaaagcattaggcatataaatgtataaatatattttatcatgtacagtacaaaaatggaaccttatgcatgggccttaggaatacaggctagtatttcagcacagacttccctgcttgagttcttgctgatgcttgcaccgtgacagtgggcaccaacacagacgtgccacccaaccccctgcacacaccaccggccaccaggggcccccttgtgcgccttggctttataactcctctgggggtgatattggtggtgatcacagctcctagcataatgagagttccatttggtattgtcacacgtctcctgcctcgcttgggttgccatgtttgagcgatggccctgttgatttcaccctgccttttactgaatctgtaaattgttgtgcaattgtggttatagtagactgtagcacattgccttttctaaactgctacatgtttataatcttcatttttaaagtatgtgtaatttttttaagtatgtattctattcatatggtctgcttgtcagtgagccagacttgcttactatattcctttataataatgctagccacttcctggattctttagtaatgtgctgtatgcaagaactttccagtagcagtgaaggagggttgcctctccaagcttcctaagggatgctgccctgtgtggggatgcattgcagaggcactagtagcatgggggctagagtggggagcgagatgtaaaagggtggggggataggagaattccagagtgcttccagcattagggtcctgagaacttctgagttcagagaaacatgcaaagtgactaacaaaatagctacttacctttgcagttttacagaccctgggagctgctttgggagtgagaaaggcaaccctccaatgtgtttcaactttaaaatgttgaattcttttcagacatggtatctcatttattctccttttctagcgtttgttgaatttcaggcagaatgtcttacagaatgtcctagaaccagattatcatttaatctgaaacagctgaggaagggacagagaaggtacaagggcaaggcagcacaaaacagatcaggagaatgaagagggaatgctttggttttttgttttgttttgttttttctttttcaagtaactaaaacagcatctacatgtagagtgttgtggagagctgagaccagggtaaagtcaagtgcagcatcagtactgcgagacccaccagcccctggagagggtcagccgagaatctggtagtgaagcctgtctagggtcccggcaccctcaccctcagccacctgcagagaggccagggccccagagactagcctggttctgaagtgggcaggggtgctgccagagccctctgccccttatgttgagaccctgctttcaggacaggccagccgttggccaccatgtcacattctgagtgagtgtcacaggtccctaacaataattttctgatctggagcatatcagcagaatgcttagcctcaaggggcctggcagctgtaatgtttgatttatgatgagaactatccgaggccacccttggcctctaaataagctgctctagggagccgcctactttttgatgagaaattagaagagtacctaatgttgaaaacatgacatgcgctcttgggatctgctgttctctccagggctccagaacctgatacctgttaccaaagctaggaaagagctttatcacaagccttcactgtcctggcatgagaactggctgccaggctcagtgtaccccattaactgtgaatgaatctgagcttggtttcctttattgcttcctctgcaatatgattgctgaaacacattttaaaaattcagaagcttgtcactcctgttaatgggaggatcagtcacacatgtgtagtacaaggcggactttgtgtttgtttttggtgttaatttttagcattgtgtgtgttgcttccccaccctgaggagaggacaccatggcttactactcaggacaagtatgccccgctcagggtgtgatttcaggtggcttccaaacttgtacgcagtttaaagatggtggggacagactttgcctctacctagtgaaccccacttaaagaataaggagcatttgaatctcttggaaaaggccatgaagaataaagcagtcaaaaagaagtcctccatgttggtgccaaggacttgcgaggggaaataaaaatgttatccagcctgaccaacatggagaaaccccgtctccattaaaaatacaaaattagcctggcatggtggcgcatgcctgtaatcccagctactctggaggctgaggcaggagaatcgcttgaacccaggaggcggaggtcgcagtgagccgagatcatgccagtgcactccagcctgggtaacaagagtgaaactccgtgtcaaaaaaaaaaaaaaaatgttactcatcctctctgaaagcaaaaaggaaaccctaacagctctgaactctggttttatttttcttgctgtatttgggtgaacattgtatgattaggcataatgttaaaaaaaaaaatttttttttggtagaaatgcaatcaccagtaaagaggtacgaaaaagctagcctctctcagagaccggggaggcagagtactactagaggaagtgaagttctgatggaatcatgcctgtcaaatgaggtcttgaagcggatgcccaaataaaagagtatattttatctaaatcttaagtgggtaacattttatgcagtttaaatgaatggaatattttcctcttgtttagttgtatctgtttgtatttttctttgatgaatgattggtcatgaggcctcttgccacactccagaaatacgtgtgcggctgcttttaagaactatgtgtctggtcacttatttctctaaaattatctcattgcctggcaatcagtcttctcttgtatacttgtcctagcacattatgtacatgggaaatgtaaacaaatgtgaaggaggaccagaaaaattagttaatatttaaaaaaatgtattgtgcattttggcttcacatgtttaactttttttaagaaaaaagttgcatgaatggaaaaaaaaatctgtatacagtatctgtaaaaactatcttatctgtttcaattccttgctcatatcccatataatctagaactaaatatggtgtgtggccatatttaaacacctgagagtcaagcagttgagactttgatttgaagcacctcatccttctttcaatgcgaacactatcatatggcattcttactgaggattttgtctaaccatatgttgccatgaattaactctgccgcctttcttaaggatcaaaaccagtttgatttgggaatcttcccctttccaaatgaaatagagatgcagtacttaactttccttggtgtttgtagatattgccttgtgtattccacttaaaaccgtaatctagtttgtaaaagagatggtgacgcatgtaaataaagcatcagtgacactct

SEQ ID NO: 6989 - DNA, 2962 bp, Homo Sapiens
  NM_201592
aagagggaggggtctgtgcgcccgcagagtcgccaggcgccctgcgagttgtctccgctgggaggggcgaggctgtcacttgccagggcgcgaggagcctcagcgcggcttggagaacttggccccgcgcagcgtctggtcactcgctctcctctggggactgcagagaagcaggacctcgggccatggggtgttttgaatgctgtatcaaatgcctggggggcattccctatgcctctctgattgccaccatcctgctctatgcgggtgttgccctgttctgtggctgcggtcatgaagcgctttctggaactgtcaacattctgcaaacctactttgagatggcaagaactgctggagacacactggatgtttttaccatgattgacatctttaagtatgtgatctacggcatcgcagctgcgttctttgtgtatggcattttgctgatggtggaaggtttcttcacaactggggccatcaaagatctctatggggatttcaaaatcaccacttgtggcagatgtgtgagcgcttggttcattatgctgacatatcttttcatgttggcctggctgggagtcacggctttcacctcactgccagtttacatgtacttcaatctgtggaccatctgccggaacaccacattagtggagggagcaaatctctgcttggaccttcgtcagtttggaattgtgacaattggagaggaaaagaaaatttgtactgtctctgagaatttcttgaggatgtgcgaatctactgagctgaacatgaccttccacttgtttattgtggcacttgctggagctggggcagcagtcattgctatggttcactaccttatggttctgtctgccaactgggcctatgtgaaagacgcctgccggatgcagaagtatgaagacatcaagtcgaaggaagagcaagagcttcatgacatccactctactcgctccaaagagcggctcaatgcatacacataaatgcatcttcctgttctttctaccatttgaatgcattggtgtttaactaagggccatccaaccatccaacctttaaaaaacaaaacgaaagtgcttctcatcaatgatatgtaaggtgacttatgaatcacctgagtacaattctttgttgtttagcacttaaatttcccaatttattaaattgatgtaaatcagatcttttctacaagctcctatccagccttttttttgaaatttctcaaactcatttactagttctgtaaaatcaaagatactaacattgtcaaatgcaaagatttgtttgatttttaaccacttcccatgtgttatacataacaccttttgcattatttcttatgttttgaaaagaaaatagctttttatactttttagttttgatttcggtaactagtttaactacaggtaaccttcaaagggaccattgtacattatgaacaatagatagagattacatcttgatgactcttgaaatatggaaattttgtctgaagatcagtggccatattactgtaggccctggttcatgttttcatcaatctaaggtgcaatttctaaatttgtaagagtaggtttaaaaaaaaaagtgcttcttatctttgttaacattgtacttttccttgatgttcttaaaaggtatttccctcagattactcatgtttatgttgtgagcatgtagaaacagtaatgctaatgcatggctagttgcctttttaagattgtgacaccaggcttaccttttaaagtttagtatatagagacaattttaatggaaataactactgtagactattgaagaatgatctctttgtgatttaagaagtggctggattggaacttttaatatgctaatgtggaaaattaattacctttatgaaggtggtttattacaaataagcacactaacccctcggaagttgttttacctactttaaaagttttaatggattgcacctctgtaaactattcctaaaatgtgtatgatatatttgaaaaggcttccattaatataatagctttgcttgcagccttccaatctatgttggtttacctgtagtgttttataaagtgtggtcagaggcccctatagaatgtattgtttgaaagtgtagtgatatatttgtgtttttatttcaagtaagtcattttaaccgaatgttcattcatattcatttataaaaagtacctgtatcaaaggaattttaacaaagagcaatcagtattattggaccaaatttggtgtttgttttcaccttgacgctcttcttttcattatttctaatgctacaagaatgctgtaaagtgtcttctaaaatgatgtagcctgacaagacatttttttcagtgtataaaactaggtagtattgtgcactgatttgaccattgtgaaatcctttctcagtgtaactgcatttctaataaaaatttattgagtgaaacaatctttgtacaatgactagtcatgcatcatcagtaattttacaagttcttgtagtaggtagggggtactactagggatatctgtggcatgattatgcattccgtagtattatttaattaatttggggttcattttgcttccttttctttatgcttagattatcttactggttcaacatttttctgatatatgcagtattacagatattcagcaaaagtattaatgggcttctttaaattctatattatagtatttcagttccgtgtcttaacagtttgtgataatttctaaaactgtcttttcaacttatgtaatgatgttgacacttttggcttttatttctggtattagagtttgtattttcacagagtgctttgtagcaggcattacaattaatctgttttgtacataaatgtgccaacagcttgatggtggcgtttttgaaatgtagaacagagtgcttgcaaaatgtaataaatacacttgtgtactttgtgtacttattattaaaaaa

SEQ ID NO: 6990 - DNA, 2272 bp, Homo Sapiens
  NM_201598
gccgggcttccgcccggtctgccggcaacgctgcggccccgcccacgtcatggcgcccgaggagaacgcggggaccgaactcttgctgcagagtttcgagcgccgcttcctggcggcacgcacactgcgctccttcccctggcagagcttagaagcaaagttaagagactcatcagattctgagctgctgcgggatattttgcacaagactgtgaagcatcctgtgtgtgtgaagcacccgccgtccgtcaaatatgcccggtgctttctctcagaactcatcaaaaagccctcgggaggctcggtcacactctccgagagcacggccatcatctcctacggtaccacaggcctggtcacatgggacgccgccctctaccttgcagaatgggccatcgagaacccggcagtcttcactaacaggactgtcctagagcttggcagtggtgctggcctcacaggcctggccatctgcaagatgtgccgcccccgggcatacatcttcagcgactgtcacagccgggtccttgagcagctccgagggaatgtccttctcaatggcctctcattagaggcagacatcactgccaagttagacagccccagggtgacagtggcccagctggactgggacgtcgcgacggtccatcagctctctgccttccagccagatgttgtcattgcagcagatgtgctgtattgcccagaagccatcatgtcgctggtcggcgtcctgcggaggctggctgcctgccgggagcaccagcgggctcctgaggtctacgtggcctttaccgtccgcaacccagagacgtgccagctgttcaccaccgagctaggccgggccgggatcagatgggaagtggaacctcgtcatgagcagaaactgtttccctacgaagagcacttggagatggcaatgctgaatctcaccctgtaggactcacacacgactccaacgggattgtgagaatcaagtcactctcatgggaagaatttttatatgggaaagcggataaaactttcattggactggaatgtttggagaatgttaatttccaaatcaggaaccacaaactgccctctaataagacatcggctatctaagcgtgtgggtgccccctttctgccagcagttctggttcttaagaaaatcaccataaatcagacatgaaaattctggctccaaaaatagcattttctttgtgcaaataaaaacgtgtgtatcaagtatgatgttcccccaacgtggacacactcagttcctcacaaagccaagcccactgcagctgccacatccctgggcttacggtgcagcaggtgcttttttcaagacaggaatcaaaatgttaggaacacggcagaaaggggacacctggagaccaaacgcaggatgaggagttctgcagaggtcacagggaagtcacagaacagtaatacgctagcaggggcatggggcgtgaagaacagaagaagagaggaagcgtttccaagcctccagagaagaaatcaaggccaaccaaagcttcccgggtcacagaaccaattcttttaccaggcagtaccactgctgtcatttcagcttctggccactgggaggtgctgctcgaaagggtttgccctgagactccaagaagaagctgcgggaaggacagcaggggtcctggggttttagcctctggcccaggagttatgtgtccataaccaaagggagcacagtctgcacccagctctcatcccatcggagctgctgcgactcccgcaggttcttccggaactggtttagcttgcccgcaggatcaggaaagtttgagaaaagcatctgcaaaaaaataaagagcagagcttacctcattgcctgtccccaccccatcccaggtcaccacctggctgaccccaggtccccgacccaacaacaacccctcccaagtccctaactccctcacttggactcgagacccttcacaccccagcagcactccgcctccaacttgacatcacagtttctggaaacttccccgcatgtcccactttcccacacttggtgccctggagcacctcccggcctctacgtgctgcccattcccctgtgagcaccctcctctcggcctctggccaacgcagtcccacccatctgtgggtaacaagggggtgtcggtgttctttgcagccttgctaaactgtctgaatcaaggatcacaaactacagcctgcaggccaaatccagcccacagcctgtgtttgtaaataaagttttattggaacaaagcca

SEQ ID NO: 6991 - DNA, 5602 bp, Homo Sapiens
  NM_201599
cgcccgcctggtgcagagcgctgggcgctgcgagcggcgctgccatttaaaggggccgcgacccctgtcccggctgctagggagggaggtagagaaggagcgcggggccgtcgctgtctgcagttctaggcttgtagcctttgcactaaccctgccgcagtacatatccagccatactcatggaccccagtgatttccccagtccatttgacccattgaccctgccagagaagcccctggctggagacctaccagtagacatggaatttggagaggatctactggaatcccagactgccccaactcgaggatgggccccccctggcccttctccatcctcgggagccctggacctgcttgatacccctgctggcctggaaaaagaccctggagtcctggatggagccactgagttgctggggctgggggggctgctctataaagccccctctcccccggaggtggaccacggtcctgagggaaccctggcatgggatgcaggagatcagaccctagagcctggaccagggggccagacccctgaggtggtaccacctgatccaggggctggggcaaattcctgttcacctgaggggctactagagcctttggctccagattctccaataacactgcagtccccacatattgaagaggaggagaccacctccatagctactgcaagaaggggctcccctgggcaggaggaggagcttccccaagggcagccacagagcccaaatgccccgcctagcccttcagtgggagagactctgggggatggaatcaacagttctcagaccaaacctgggggctctagcccccctgcacatccttccttgccaggagatggcctgactgcgaaggcgagtgagaagccgcctgaacggaagagaagcgagcgcgttaggagagcagaacctccaaaacctgaggttgtagattccactgagagcattccagtgtcagatgaggattctgatgccatggtagatgaccccaatgatgaggactttgtgccattccggccccggcgctctcctcgcatgtccctacgctcaagtgtgtcacaaagggccgggcgctctgcagtgggcaccaagatgacttgtgcacattgccggacaccactgcagaaggggcagactgcctatcagcgcaaggggctgcctcagctcttctgctcgtcatcctgcctcaccactttctccaagaagccctcgggcaaaaagacctgtaccttctgcaagaaggagatctggaacaccaaggactcggttgtggcgcagactggttctggaggctccttccatgagttctgcacatccgtctgtctctccctgtatgaggcccagcagcagcgcccgatcccccagtctggggatcccgccgacgctactcgctgcagcatatgccagaagactggagaggtcctgcacgaggtcagcaatggcagcgtggtacaccggctctgcagcgattcttgcttctccaaattccgggccaacaagggactgaaaaccaactgttgtgaccagtgtggggcttacatctacaccaagaccgggagtcctggccctgagctcctcttccacgagggccaacaaaagcggttctgcaacacaacctgcttgggggcgtacaagaagaaaaacacacgtgtgtacccatgtgtctggtgcaagaccctgtgtaagaactttgagatgctatcacatgtggatcgtaatggcaagaccagcttgttctgttccctgtgctgtaccacttcttacaaagtgaagcaggcagggctcactggccctccccgaccctgcagcttctgccgccgcagcctctctgacccctgttactacaacaaggttgaccgcacagtctaccagttctgcagccccagctgctggaccaagttccagcgcacaagccctgaggggggcattcacctgagctgtcactactgtcacagcctcttcagtggcaagcctgaggtcttggactggcaggaccaagtgttccagttctgctgccgtgattgctgtgaggacttcaagcggcttcggggtgtggtgtcccagtgtgagcactgtcggcaggagaaactcttgcatgagaaactccgattcagcggagtggagaaaagcttctgcagcgaaggctgtgtgctgctgtacaaacaggacttcactaagaagctgggcttgtgctgtatcacttgtacttactgctcccagacctgccagcgcggagtcaccgagcaactggatggcagcacctgggacttctgcagtgaggactgtaagagcaagtacctgctgtggtactgcaaggctgcccggtgccatgcgtgtaagcgccaggggaagctgctggagaccatccactggcgtgggcagatccgtcatttctgcaaccagcagtgtcttctgcgtttctatagccagcagaaccaacccaacctggatacccagagtgggcccgagagcctcctgaacagtcagtctcctgagtcaaaaccccagacaccctctcaaaccaaagtggagaacagcaacacagtgaggaccccagaggaaaatgggaatttgggcaagatccctgtgaagacccgatcagctcccactgctcccacccctccacccccaccacccccagcaacaccccgcaaaaacaaggctgccatgtgtaagccactgatgcagaatcggggcgtctcctgcaaggtggagatgaagtccaaaggaagtcaaacagaagagtggaagccacaggtgatcgtgctgcccatcccagtgcccatcttcgtgccagtgcctatgcatctgtactgccagaaagtcccggtgcctttctcgatgcctatcccggtgcctgtgcccatgttcttgcccactaccttggagagcacagacaagattgtagagaccattgaggagctgaaggtgaagatcccttccaaccccttggaggccgacatcctggctatggcagaaatgattgcagaggctgaggagttagacaaggcctcatctgacctttgtgatcttgtgagcaaccagagtgcagagggactcctggaagactgtgacctgtttgggcctgctcgagatgatgtcctggccatggcagtcaagatggccaatgtcttggatgagcctgggcaagacttggaggcagacttccctaagaatcctctggacattaatcccagtgtagacttcctctttgattgtggcctggtagggcctgaggatgtgtctactgaacaagaccttccccgaaccatgaggaagggtcaaaagcggctggtgctttccgaaagctgctcccgggactccatgagcagtcagcctagttgtaccgggctcaactattcatatggtgtcaatgcttggaagtgctgggtgcagtcaaaatatgccaatggagaaaccagcaagggtgatgagctgcgctttggccccaaacccatgcgtatcaaagaggatattctcgcctgctcagctgctgagctcaactacggtctggcccagtttgtgagagaaatcactcggcccaatggtgaacgatatgaacctgacagtatctactatttgtgtcttggcatccagcagtacttgctggaaaataaccggatggtgaacattttcacggacctttactacctgacttttgttcaagaactcaacaagtctctgagtacctggcagcccacactcctccccaacaatacggtgttctctcgagtggaggaggagcacctctgggagtgtaagcaactgggggtctactcgccctttgtcctcctcaacaccctcatgttcttcaacactaagttttttgggctgcagacagctgaggaacacatgcaactctccttcaccaatgtggtgcggcagtcccgcaagtgtaccacccctcggggcaccaccaaggtggtgagcatccgctactatgccccagtccgccagaggaaagggcgagacacgggtcctggaaaacggaagagagaagatgaagcccctatcttagagcagcgtgagaaccgcatgaatcccctccgctgccctgtcaagttctatgaattctatctctcaaaatgtcctgaaagcctccggactcgcaacgatgtgttctacctgcaacctgaacggtcctgcatcgccgagtcacctctctggtattctgtgatccccatggaccgcagcatgttggagagcatgctcaatcgcatcctggctgtgcgcgagatttatgaggaactgggtcgtcctggggaggaagacctggactgagctcgtgtgccatccatatccatctttcacatcaatgtctgtcctgtggccatgtccctcagggtgacaggcccaggaaccaatgctactcattctgaagggccctgactgctcctttccgctcacccattccctgccttctctaggaaccctggcttttatcttcttccgtaccacttgacaaccatggggccctggtcttctgtactcaggggctggtctcccagtgatgggcaaaagccagcttgcccgttttctttatgcttcagagtaaacccctccttctgggtccagactctgggtggagtgttaatagctctggtgatcctgttggctttgggtttcctgacccatcccgcataggtagagcctcttgttcctaggcatgacctagggaaaaacccagctgccttctctgccctgtgcccactcccttctctactcttccccagcaccatgccaaaaggtcttatctgaaaggtaagaaataaacaatgaaagcgatgaggggaccatttacataaaacacagagcttagacactcttcccctcctatgaaataattggttgttggcaccatctcaccaccgcatatccctcaccccctcggcaagcaccaatccttggtgctgccgtttttaaaatcttccaaatgcctttttttcctcagaggcagagaatgactaagtacggggagcagactcctgttgtgcagactcctgtccccttggtttctgtgtttgtctctctgccatcttaggttgccatgagccatggtgtcaacatgcttagccccctctgtaactgcctccctttagttcaatggacagacctcccaaggcaaaaactaccttctgacttgggttgaggctgggttcccctctattgttcccctatcataagagctaggccaagcctatgggaccttgagtcatgcaggatgggatctgtggtcaaaggacaggcgaggagctgtgggcgcagggcctgccgccactgcctacatcttctctcttccccatcttgcattggaggtcccagaaaacaattagcttctggcaaagggggtacccacttctttccctgttgactttgctgtttcccaggctcctttttgtgtttttataactgtcaccagttagccactgtttaaattgtatatattgttctgaggcgcctggcctgtcccttcagtgagccatgcccacccttgtgttgtagtgagaagctgttgtcacgactaaccttctgtctctgaaattgtttgtttcaaataaagagttaaaattgtcaaaaaaaaaaaaaaaaaa

SEQ ID NO: 6992 - DNA, 1364 bp, Homo Sapiens
  NM_201612
gtgagggggcgcggtcaccgcccagggttcccacgaacgccaaggcggccacgtcctgctccccctggtgaagaagctgccctgggcttgtcgtcctagggtctccagacatgtctgaggtgaagagccggaagaagtcggggcccaagggagcccctgctgcggagcccgggaagcggagcgagggcgggaagacccccgtggcccggagcagcggaggcgggggctgggcagacccccgaacgtgcctgagcctgctgtcgctggggacgtgcctgggcctggcctggtttgtatttcagcagtcagaaaaatttgcaaaggtggaaaaccaataccagttactgaaactagaaaccaatgaattccaacaacttcaaagtaaaatcagtttaatttcagaaaagtggcagaaatctgaagctatcatggaacaattgaagtcttttcaaataattgctcatctaaagcgtctacaggaagaaattaatgaggtaaaaacttggtccaataggataactgaaaaacaggatatactgaacaacagtctgacgacgctttctcaagacattacaaaagtagaccaaagtacaacttccatggcaaaagatgttggtctcaagattacaagtgtaaaaacagatatacgacggatttcaggtttagtaactgatgtaatatcattgacagattctgtgcaagaactagaaaataaaatagagaaagtagaaaaaaatacagtaaaaaatataggtgatcttctttcaagcagtattgatcgaacagcaacgctccgaaagacagcatctgaaaattcacaaagaattaactctgttaagaagacgctaaccgaactaaagagtgacttcgacaaacatacagatagatttctaagcttagaaggtgacagagccaaagttctgaagacagtgacttttgcaaatgatctaaaaccaaaggtgtataatctaaagaaggacttttcccgtttagaaccattagtaaatgatttaacactacgcattgggagattggttaccgacttactacaaagagagaaagaaattgctttcttaagtgaaaaaatatctaatttaacaatagtccaagctgagattaaggatattaaagatgaaatagcacacatttcagatatgaattagtttgacattattgagattagactaaggtaatttttttaatgggacctctcatgagaagactggtaaatcaaaaataatgatattttggagcaaaagtcattttatatttaatcctattttgtacagtaaaaataaaactttaaaacaggttgattttccaaaataaatatgctaaaacctaaaaaaaaaaaaaaaaaaaaa

SEQ ID NO: 6993 - DNA, 4345 bp, Homo Sapiens
  NM_201624
ggagacaccggaaggagccgcggctgctgcgggaagtggccagttcaggaggcggaccccccgagggcagcgctgcggggccgttttccggccctcctgacgcgacactgcccctctccgagagctgagaaggaaaagaggagcttgcggaggtgcggctgcaggccgttgttggtcgagctggcgggtcccgcgggccaggccgtggaggtgttacctcattttgaaagtcttgggaaacaggaaaaaattcctaacaaaatgtcagcttttcgaaatcattgtccacatttggattcagttggtgaaataacaaaagaagatttgatacaaaaatcccttggtacttgtcaggattgtaaagtccaaggaccaaatctttgggcatgtctggagaatagatgttcatatgttggctgtggtgaatcacaagtagatcacagcaccatacattctcaggagacaaagcattatctaactgtgaaccttaccactcttcgagtatggtgttatgcttgcagcaaagaagtatttttggataggaaattaggaactcagccttcattgcctcatgtaagacaacctcaccaaatacaagaaaacagtgtccaggattttaaaatacccagtaatacaacattaaaaactcctctggttgccgtatttgatgatctggatatagaagcggatgaagaagatgaacttagggccagaggtcttacaggtttgaaaaatattggaaatacttgttacatgaatgcagctttgcaggctctttctaattgcccacctttgacacagttttttcttgattgtggaggactagctcgaacagataagaaacctgccatttgtaaaagttatctcaaactaatgacagagctgtggcataaaagcaggccaggatctgttgtgcctactactctgtttcaaggaattaaaactgtaaatccaacatttcgggggtattctcagcaggatgctcaagaattccttcgatgtttaatggatttgcttcatgaagaattgaaagagcaagtcatggaagtagaagaagatccgcaaaccataaccactgaggagacaatggaagaagacaagagccagtcggatgtagattttcagtcttgtgaatcttgtagcaacagtgatagagcagaaaatgaaaatggctctagatgcttttctgaagataataatgaaacaacaatgttaattcaggatgatgaaaacaattcagaaatgtcaaaggattggcaaaaagagaagatgtgcaataagattaataaagtaaattctgaaggcgaatttgataaagatagagactctatatctgaaacagtcgacttaaacaaccaggaaactgtcaaagtgcaaatacacagcagagcttcagaatatatcactgatgtccattcgaatgacctgtctacaccacagatccttccatcaaatgaaggtgttaatccacgtttatcggcaagccctcctaaatcaggcaatttgtggccaggattggcaccaccacacaaaaaagctcagtctgcatctccaaagagaaaaaaacagcacaagaaatacagaagtgttatttcagacatatttgatggaacaatcattagttcagtgcagtgtctgacttgtgacagggtgtctgtaaccctcgagacctttcaagatctgtccttgccaattcctggcaaggaagaccttgctaagctgcattcatcaagtcatccaacttctatagtcaaagcaggatcatgtggcgaagcatatgctccacaagggtggatagcttttttcatggaatatgtgaagaggtttgttgtctcatgtgtccctagctggttttggggtccagtagtaaccttgcaagattgtcttgctgccttctttgccagagatgaactaaaaggtgacaatatgtacagttgtgaaaaatgcaaaaagttgagaaatggagtgaagttttgtaaagtacaaaactttcctgagattttgtgcatccaccttaaaagattcagacatgaactaatgttttccaccaaaatcagtacccatgtttcatttccgctagaaggcttggatcttcagccatttcttgctaaggatagtccagctcaaattgtgacatatgatcttctgtcagtcatttgccatcatggaactgcaagtagtggacactatatagcctactgccgaaacaatctaaataatctctggtatgaatttgatgatcagagtgtcactgaagtttcagaatctactgtacaaaatgcagaagcttacgttcttttctataggaagagcagcgaagaggcacaaaaagagaggagaaggatatcaaatttattgaacataatggaaccaagcctccttcagttttatatttctcgacagtggcttaataaatttaagacctttgccgaacctggccctatttcaaataatgactttctttgtattcatggaggtgttcctccaagaaaagctggttatattgaagacctggttttgatgctgcctcagaacatttgggataacctatatagcaggtatggtggaggaccagctgtcaaccatctgtacatttgtcatacttgccaaattgaggcggagaaaattgaaaaaagaagaaaaactgaattggaaatttttattcggcttaacagagcgttccaaaaagaggactctccagctactttttattgcatcagtatgcagtggtttagagaatgggaaagttttgtgaagggtaaagatggagatcctccaggtcctattgacaatactaagattgcagtcactaaatgtggtaatgtgatgcttaggcaaggagcagattctggccagatttctgaagaaacatggaattttctgcagtctatttatggtggagggcctgaagttatcctgcgacctccggttgttcatgttgatccagatatacttcaagcagaagaaaaaattgaagtagaaactcggtctttgtaatttttaggatgtagagagttctaatgaggaatcattttcatgtgccctgacatgtacacatgcgaaaacattcctaaaagcgtgtttatttgctttattttttttcatcatttatcccatttatttcttcttagtgggcattatggaagaatatattaaaatgtgtaatataccacaggttggtatatttagttttaaatacttaccataaagtctttcagtgtaatttttttttgagacagagtcttgctttgtcacccaggctggagtgctgtggtgttacctcagctcactgcagcctccacctcctgggttcaagcgattctcctgcctcagcctctcgagtagctgggattacaggcacctgccaccatgcccggctaatttttgtattttagtagagatggggtttcaccatgttggccaggctagtctcaaactcctgacctcaggtgatccacccacctcggcctcccaaagtgctgggattacaggtgtgagccacagcgcctggcccagtgtaatatttttgaaagaggagggacaattgtgaaatcagtaggttatctttaatctttacactacatgcagatccatagtatcctttgtagtgttgtaaatacttttgctttgaaaactttttcattgtcctaaatcaccctgactctgaccagtctttcagttctccaaaagcccaatttaattgtatagttttgtcatggcttcatataataaagagcctattttaagttgaaagtagtagtcagaaaattgttaatttcctaaagctcaggaaactagggtgtcactttttttgcactgcagcatatacactaactagcttattaaaatttacaaaatgtctttttgaatgtatcaaggatatatttagtttgagtggaatttgtcagcagatatcagtaacttattgccgcttatattgtacaatgttaaacttcaattcctgtaacctggttagtattaatgtcagtgactaaaaaacttagagttagttttagggcactttttattttgagagcatgaagtgtggaatgtgtcactacgattgttgataaagctgaggccacttgcaacttgattttttaaatgaaatagataaagtctttttgaataatatagtatgcactgctatttgcttgattatgtaatgtcaaaagtttaactatattccaagtacaaaaacatactggattacattgaggatgttgaatagcattcatgatggctttgttttggtttggggcagctgtcaccagctaaagcaatgttgttaaaattagctcaataaaaatgtctttaaaatgtaaaaaaaaaaaaaaaaaaaaaa

SEQ ID NO: 6994 - DNA, 2839 bp, Homo Sapiens
  NM_201632
atccccgcctcccctcctgcccaggtgactgactaatccgccgccttcaggagacagaattggccaaggcctgaaggccccggagtgcaccagcggcatgtacaaagagaccgtctactccgccttcaatctgctcatgcattacccacccccctcgggagcagggcagcacccccagccgcagcccccgctgcacaaggccaatcagcccccccacggtgtcccccaactctctctctacgaacatttcaacagcccacatcccacccctgcacctgcggacatcagccagaagcaagttcacaggcctctgcagacccctgacctctctggcttctactccctgacctcaggcagcatggggcagctcccccacactgtgagctggttcacccacccatccttgatgctaggttctggtgtacctggtcacccagcagccatcccccacccggccattgtgcccccctcagggaagcaggagctgcagcccttcgaccgcaacctgaagacacaagcagagtccaaggcagagaaggaggccaagaagccaaccatcaagaagcccctcaatgccttcatgctgtacatgaaggagatgagagccaaggtcattgcagagtgcacacttaaggagagcgctgccatcaaccagatcctgggccgcaggtggcacgcgctgtcgcgagaagagcaggccaagtactatgagctggcccgcaaggagaggcagctgcacatgcagctatacccaggctggtcagcgcgggacaactacgggaagaagaagaggcggtcgagggaaaagcaccaagaatccaccacaggaggaaaaagaaatgcattcggtacttacccggagaaggccgctgccccagccccgttccttccgatgacagtgctctaggctgccccgggtccccagctccccaggactcaccctcataccatctgctgccccgcttccccacagaactgcttactagccctgcggagccggcacctacatccccaggtctctccactgctctcagcctcccaaccccagggcccccacaggccccccgcagcaccctgcagagcacacaggtacagcaacaggaatctcagagacaggtggcctagcaggcacaggacacctggccgcctccaggagcctaccccctgaaagtgacagagacccagatctcatggaaactggccaggggtcctgttaacgtcatctcagggtccagaccctgaagatttcagaggctgcaggacttctgcctgaacctggggtcatcgattcaaactgctccaagtggtgggaatcagatctgtcttgatgtgtcatctaattaagggaatcccttgtacctatggctgcctgcatctattctttgtaccatctgtcttgccagccagaagcctctgcctccctagcttttctgctataggtcagagatgggctgaactgagcctagctaccttctctacccatctcccccatcccccactgccacaccctccccattcagacacttcatggaccaagaatgagctggtttgtcaaacaacatgtgagcatggtcacaagcacaaagctcaagatgacagctcttctaaggaaatggagaagctctgtttataaaaacaaaaacaaaaccagctgctactcataagttggaccagaggaagccccttactatgatctcaggagcttgcaagaagcaggaaggggaatggaataggttaagtttaggcctatcaacctaagcaacagaaataatctgacactaccttatcaggcaaattggggaggggagggtgtatctagctctagttcaaattatttggaagtgttccctgagaaacccaccagcctaagaagctctggccccaggcttgtcactagcagctgcagtcaacagttcaaagaagtcatggcccaaatccagtgtgcacccctccccattcacagagcctttttcacaattccatttccagttcatctatggcagtccagccagctcctgggcagcttgagagggcaaacccaaaacctcatgacagccagagcctgtctttcagcattcagtccgcctggccggctccagtttccccatggggctgcgggacagaggaccattacaactagatcaaggagcccagaaaacctccagtagtggacaacaggttttcaccatagcctacgttaacccatttttgagccaagcttcaaccctcagccttgaaaaacaagtctttaatttaatttttgttttttgcctaaatccaaagaaaaagggctgccgggccaggcgcggtggctcacgcctgtaatcccagcactttggcaggccgaggcaggtggatcacctgacgtcagtagtttgagaccagcctggccaacatggtgaaaccctgtatctactaaaaatacaaaaattagccggacgtggtggtgcgcgcatgtaatcccagctactcgggaggctgaggcggaagaatcacttgaacccgggaggcggaggttccagtgagccgagatggcgctattgcactccagtctgggtaacagggagactgcatctcaaaaaaaaaaaaaaaaaaaaaaaagggctgtccatgtattcacacacccctcaaaaaaagcctttagttcctactttagccactggtttctcagaatccaaagatcacatattctagtgtaacactgcaagaagtcttgagaaaaagattattgtagtgttcaaaatatttttgtattgttaatgcatcatcatagaaaaacttttaaacatgagaataaagatactttttactgggtttgtttttcaaagcctgaaaaaaa

SEQ ID NO: 6995 - DNA, 2695 bp, Homo Sapiens
  NM_201994
gatcggctcgatgagcggaggcgctgctgcggcgctgcggccgacgccgggtccgcaccaactgtctccccctcccagcttcttacctcggcttcctactccttcccccgcccgcccagcaccgccagcccgggagagctgccgggagttccccgggagcctcaggtggtgactatcctgttgagaagcaaaagatactttgcaagtaaaaaatatgcctcccaagtttaagcgccacctcaatgatgatgatgtcacaggttctgtgaaaagtgaaaggagaaatcttttggaagatgattcagatgaagaagaggacttttttctaaggggaccatctggaccaagatttggacctagaaatgataaaattaagcatgttcagaatcaagtggatgaagttattgatgtcatgcaagaaaatattacaaaggtaattgagagaggggagagactagatgaactacaggacaaatcagaaagcttatcggataatgcaacagcttttagcaacagatccaaacaacttcgaaggcaaatgtggtggcgtggatgcaaaataaaagccatcatggctttggttgctgctatccttttgctagtgattatcattcttatagtcatgaaataccgtacttgatttgatgacagagatcttcattaaacaagatctgggacagtaataaaagattgctgcataatttaaatgaaacctatgtgtatataactttcaaaacttctttttcaagaaactaagagctcagatcatcctgcacttgaaaaatgaagttttaccaccatcaaaactatcattatttaacaacaagtgaagatcaacagaaaaattcaagtagctttgcaaatactagttgatactcagtgaaatcacgtcactattttgatgcctgaatccatacctttgtgatttatgtttaattacagaagcctattgccttgcagcaattttgttgttataatactgattaattggttactccttcttattataactcagtaatacctgtggtcatttggttcctctatcctgacaaagttcactggaaattgccctcagattttataaactgggggatttcttaattagataaaagttcattactgaagatggaatattatataagatggaggaagggtaattaatagacatgagatatagaaatactttgttagccctgctatagattgcctattgtagtctttctgtgcatttcaatagtctgtattaggaaattataacttcagcacttttgatagcaaaaattggcatctttcaattctgtatagtatgtgactatcctgtaaatgataatatgtgtacagactgagaaggcaggaatataaagtaattgaaatctctcattgccggtatactctaaaacatgcttgatgccttgtcagcatcattgcacacattgactctgtatttacatctgtatatacactatgattagaaaatatgcaagaaattgtttttccatgttaagaacaaatgccattagaagatgtccccttaattgtattgtcagagtattactatgtcaaggatgactgttctgttaacctaattttgtgttttcacatggaaatgtgattggactccatttttctgtgagttgagagtaagagcataagtcagtttgaaagcatttacaagtttgttttagaatgtagtaagggctgaaaggtgctctacttcttaacttgttttttccatgttgtagacaaatgaaatttgtctaaatgcttttgtctaaaaatgcatttgtctaaatgctttagattgatgtagggtttagatcctctttaatactttgagatagtcttattctgattttttttttcttctggaaaccaagtagaattagggatgggaatacaaatgcatttattctggcttctgttttattccaagaagcttcttggaacaaatcagtaggaattgaaaagaaagcatgaccaacccaattacaggggataaatgtaagcttgttaaagtaagcaccacaccatgtttctgtctccccagcacccagcacagtgctgtgaaccttggcagatgctagataaatgtgtgttgaatgaatgtgcctatgaagccacaaagatgccacatgttagtatatcagtgagaggtgactccacagtgctctctggagaagcaatatgagtgactgaagagtggggccttttgcttttgcctggatataggggtgctcttctactgtaattgggtgtggaaaaactctggctttatggtattccattaggttcttttcatttaaagtagtcttaaaatcaaagtatccaatattttaaagccacaaagtagattacataattagcagagattttagtcagtaaaatgttagaaatcaaactataagaaaattcaagtcctttattttgtgtcttgggtatatgtcattattttaaattccacactcccttatttaatcactttggtaagtgcctttgatgttttgaaatgtatagtgggagatgagcaaatgtaaatgtcatgtgccctgttccctagcttctcaattcctcataaccatttttaccagtgttgcaaagtttagacctttgtgttaatatcagaagtgtatttgtagcccctccatagtgaacaatgaaataaactatttcatagaaaacaaaaaaaaaaaaaaaa

SEQ ID NO: 6996 - DNA, 2953 bp, Homo Sapiens
  NM_201997
gagctcgccgtcgctccgtcatagagttcgccccaccccatcccctcctttctggactcggagctcagttcacgcagtaacaaatgaagtgcgcgctgcgacacctcccagcccaccgaactccgccgccatttcctcgcttggcctaacggttcggccaatcccagcgcgcatcaagaaggactgaggctccgccaatcggaggccgccgatttcgacccttcgcctcggcccggcccaatccaggccccggccccgccgcccccggcccgcccccgcggtgccctctctcctccctctttgtgcgtctcgcgccgccgccgcccgccgcgtgagaggacgggctccgcgcgctccggcagcgcattcgggtcccctccccccgggaggcttgcgaaggagaagccgccgcagaggaaaagcaggtgccggtgcctgtccccgggggcgccatggcgaccggagcgaacgccacgccgttggacttcccaagtaagaagcggaagaggagccgctggaaccaagacacaatggaacagaagacagtgattccaggaatgcctacagttattccccctggacttactcgagaacaagaaagagcttatatagtgcaactgcagatagaagacctgactcgtaaactgcgcacaggagacctgggcatcccccctaaccctgaggacaggtccccttcccctgagcccatctacaatagcgaggggaagcggcttaacacccgagagttccgcacccgcaaaaagctggaagaggagcggcacaacctcatcacagagatggttgcactcaatccggatttcaagccacctgcagattacaaacctccagcaacacgtgtgagtgataaagtcatgattccacaagatgagtacccagaaatcaactttgtggggctgctcatcgggcccagagggaacaccctgaagaacatagagaaggagtgcaatgccaagattatgatccgggggaaagggtctgtgaaagaagggaaggttgggcgcaaagatggccagatgttgccaggagaagatgagccacttcatgccctggttactgccaatacaatggagaacgtcaaaaaggcagtggaacagataagaaacatcctgaagcagggtatcgagactccagaggaccagaatgatctacggaagatgcagcttcgggagttggctcgcttaaatgggacccttcgggaagacgataacaggatcttaagaccctggcagagctcagagacccgcagcattaccaacaccacagtgtgtaccaagtgtggaggggctggccacattgcttcagactgtaaattccaaaggcctggtgatcctcagtcagctcaggataaagcacggatggataaagaatatttgtccctcatggctgaactgggtgaagcacctgtcccagcatctgtgggctccacctctgggcctgccaccacacccctggccagcgcacctcgtcctgctgctcccgccaacaacccacctccaccgtctctcatgtctaccacccagagccgcccaccctggatgaattctggcccttcagagagtcggccctaccacggcatgcatggaggtggtcctggtgggcccggaggtggcccccacagcttcccacacccattacccagcctgacaggtgggcatggtggacatcccatgcagcacaaccccaatggacccccacccccttggatgcagccaccaccaccaccgatgaaccagggcccccaccctcctgggcaccatggccctcctccaatgggtaaatcagtacctgggaagtacgcctgtgggctctggggtctatcgcctgcatcaaggaaaaggtatgatgccgccaccacctatgggcatgatgccgccgccgccgccgcctcccagtgggcagcccccaccccctccctctggtcctcttcccccatggcaacaacagcagcagcagcctccgccaccccctccgcccagcagcagtatggcttccagtacccccttgccatggcagcaaagatccctccccgcggcggcgatggcccgagccatgagagtgaggactttccgcgcccattggtgacccttccaggcagacagcctcagcaacgcccctggtggacaggatggttcggcaaagcagcctgagttatttttgtggacggaatcggaacacgctggctccatatcgtgaaatttttattaatttttttctttttcctttgttacttctttatcttttcctttcttcagactccgtccaaggagatgctctccccggtcttctgctgcaatttagattcctttcccttctctccagttctccttcccttaccaaggagaggggagcaaatggttttgggcaagggctttggccattcatgtcaagctggttgtgggtttttcaaggtgccatagccacccccaaagatgtttgtttaaagcgtggggttttttaatctctgccacccttgtcaagggagtcttgtaaagttgccgagggtaggttcatctccaggtttcgggattcccatccgtcctggcgatcctgccagcagtgggtgggcagcctgagctccctcgggctcgcctgccagcctggagttcttcctgtgctccttgatcacctgagctgcctcagattccatttggtcctctccttcctggaaggcttccttttatgttttgttttaatcccaaatgtctgaatgttttgcagtgtgtaggggtttgagccccttgttcattctccttcctttttcctcccgcttccctctccatgaagtgattctgttgacaataatgtatactgcgcgttctcttcactggtttatctgcagaaatttctctgggcttttttcggtgttagattcaacactgcgctaaagcggggatgttccattgaataaaagagcagtgtggttttctgggtc

SEQ ID NO: 6997 - DNA, 3487 bp, Homo Sapiens
  NM_202003
actgaaagctccggtgccagaccccacccccggccccggcccgggaccccctcccctcccgggatcccccggggttcccaccccgcccgcaccgccggggacccggccggtccggcgcgagcccccgtccggggccctggctcggcccccaggttggaggagcccggagcccgccttcggagctacggcctaacggcggcggcgactgcagtctggagggtccacacttgtgattctcaatggagagtgaaaacgcagattcataatgaaaactagcccccgtcggccactgattctcaaaagacggaggctgccccttcctgttcaaaatgccccaagtgaaacatcagaggaggaacctaagagatcccctgcccaacaggagtctaatcaagcagaggcctccaaggaagtggcagagtccaactcttgcaagtttccagctgggatcaagattattaaccaccccaccatgcccaacacgcaagtagtggccatccccaacaatgctaatattcacagcatcatcacagcactgactgccaagggaaaagagagtggcagtagtgggcccaacaaattcatcctcatcagctgtgggggagccccaactcagcctccaggactccggcctcaaacccaaaccagctatgatgccaaaaggacagaagtgaccctggagaccttgggaccaaaacctgcagctagggatgtgaatcttcctagaccacctggagccctttgcgagcagaaacgggagacctgtgcagatggtgaggcagcaggctgcactatcaacaatagcctatccaacatccagtggcttcgaaagatgagttctgatggactgggctcccgcagcatcaagcaagagatggaggaaaaggagaattgtcacctggagcagcgacaggttaaggttgaggagccttcgagaccatcagcgtcctggcagaactctgtgtctgagcggccaccctactcttacatggccatgatacaattcgccatcaacagcactgagaggaagcgcatgactttgaaagacatctatacgtggattgaggaccactttccctactttaagcacattgccaagccaggctggaagaactccatccgccacaacctttccctgcacgacatgtttgtccgggagacgtctgccaatggcaaggtctccttctggaccattcaccccagtgccaaccgctacttgacattggaccaggtgtttaagcagcagaaacgaccgaatccagagctccgccggaacatgaccatcaaaaccgaactccccctgggcgcacggcggaagatgaagccactgctaccacgggtcagctcatacctggtacctatccagttcccggtgaaccagtcactggtgttgcagccctcggtgaaggtgccattgcccctggcggcttccctcatgagctcagagcttgcccgccatagcaagcgagtccgcattgcccccaaggtgctgctagctgaggaggggatagctcctctttcttctgcaggaccagggaaagaggagaaactcctgtttggagaagggttttctcctttgcttccagttcagactatcaaggaggaagaaatccagcctggggaggaaatgccacacttagcgagacccatcaaagtggagagccctcccttggaagagtggccctccccggccccatctttcaaagaggaatcatctcactcctgggaggattcgtcccaatctcccaccccaagacccaagaagtcctacagtgggcttaggtccccaacccggtgtgtctcggaaatgcttgtgattcaacacagggagaggagggagaggagccggtctcggaggaaacagcatctactgcctccctgtgtggatgagccggagctgctcttctcagaggggcccagtacttcccgctgggccgcagagctcccgttcccagcagactcctctgaccctgcctcccagctcagctactcccaggaagtgggaggaccttttaagacacccattaaggaaacgctgcccatctcctccaccccgagcaaatctgtcctccccagaacccctgaatcctggaggctcacgcccccagccaaagtagggggactggatttcagcccagtacaaacctcccagggtgcctctgaccccttgcctgaccccctggggctgatggatctcagcaccactcccttgcaaagtgctcccccccttgaatcaccgcaaaggctcctcagttcagaacccttagacctcatctccgtcccctttggcaactcttctccctcagatatagacgtccccaagccaggctccccggagccacaggtttctggccttgcagccaatcgttctctgacagaaggcctggtcctggacacaatgaatgacagcctcagcaagatcctgctggacatcagctttcctggcctggacgaggacccactgggccctgacaacatcaactggtcccagtttattcctgagctacagtagagccctgcccttgcccctgtgctcaagctgtccaccatcccgggcactccaaggctcagtgcaccccaagcctctgagtgaggacagcaggcagggactgttctgctcctcatagctccctgctgcctgattatgcaaaagtagcagtcacaccctagccactgctgggaccttgtgttccccaagagtatctgattcctctgctgtccctgccaggagctgaagggtgggaacaacaaaggcaatggtgaaaagagattaggaaccccccagcctgtttccattctctgcccagcagtctcttaccttccctgatctttgcagggtggtccgtgtaaatagtataaattctccaaattatcctctaattataaatgtaagcttatttccttagatcattatccagagactgccagaaggtgggtaggatgacctggggtttcaattgacttctgttccttgcttttagttttgatagaagggaagacctgcagtgcacggtttcttccaggctgaggtacctggatcttgggttcttcactgcagggacccagacaagtggatctgcttgccagagtcctttttgcccctccctgccacctccccgtgtttccaagtcagctttcctgcaagaagaaatcctggttaaaaaagtcttttgtattgggtcaggagttgaatttggggtgggaggatggatgcaactgaagcagagtgtgggtgcccagatgtgcgctattagatgtttctctgataatgtccccaatcataccagggagactggcattgacgagaactcaggtggaggcttgagaaggccgaaagggcccctgacctgcctggcttccttagcttgcccctcagctttgcaaagagccaccctaggccccagctgaccgcatgggtgtgagccagcttgagaacactaactactcaataaaagcgaaggtggacaaaaaaaaaaaaaaaaaaaaa

SEQ ID NO: 6998 - DNA, 1891 bp, Homo Sapiens
  NM_202468
ggcccggtctggagtttgcggagggccgagccgggtgcgcacggggaggcggaggcagcggcggcggcggcggcggcggcggcggcggcggagcaggaccattctggctgctgtctggacaagaagtcgtagggggtgagggtggaagctgggaaacccacaggaggcaaccacactagtttagatcttctggtgaccccacttctcgctgctcatgccgctgggactggggcggcggaaaaaggcgccccctctagtggaaaatgaggaggctgagccaggccgtggagggctgggcgtgggggagccagggcctctgggcggaggtgggtcggggggcccccaaatgggcttgcccccccctcccccagccctgcggccccgcctcgtgttccacacccagctggcccatggcagtcccactggccgcatcgagggcttcaccaacgtcaaggagctgtatggcaagatcgccgaggccttccgcctgccaactgccgaggtgatgttctgcaccctgaacacccacaaagtggacatggacaagctcctggggggccagatcgggctggaggacttcatcttcgcccacgtgaaggggcagcgcaaggaggtggaggtgttcaagtcggaggatgcactcgggctcaccatcacggacaacggggctggctacgccttcatcaagcgcatcaaggagggcagcgtgatcgaccacatccacctcatcagcgtgggcgacatgatcgaggccattaacgggcagagcctgctgggctgccggcactacgaggtggcccggctgctcaaggagctgccccgaggccgtaccttcacgctgaagctcacggagcctcgcaaggccttcgacatgatcagccagcgttcagcgggtggccgccctggctctggcccacaactgggcactggccgagggaccctgcggctccgatcccggggccccgccacggtggaggatctgccctctgcctttgaagagaaggccattgagaaggtggatgacctgctggagagttacatgggtatcagggacacggagctggcggccaccatggtggagctgggaaaggacaaaaggaacccggatgagctggccgaggccctggacgaacggctgggtgactttgccttccctgacgagttcgtctttgacgtctggggcgccattggggacgccaaggtcggccgctactaggactgcccccggaccctgcgatgatgacccgggcgcaacctggtgggggcccccagcagggacactgacgtcaggacccgagcctccagcctgagcctagctcagcagcccaaggacgatggtgaggggaggtggggccaggccccctgccccgctccaatcggtaccatcccctccctggttcccagtctggccggggtccccggcccccctgtgccctgttccccacctacctcagctgggtcaggcacagggaggggagggatcagccaaattgggcggccacccccgcctccaccactttccaccatcagctgccaaactggtccctctgtctccctggggccttgggttctgtttgggggtcatgaccttcctagtttcctgacgcagggaatacaggggagagggttgtccttccccccagcaaatgcaataatgccctcacccctcctgagaggagccccctccctgtggagcctgttacctccgcatttgacacgagtctgctgtgaaccccgcaacctcctccccacctcccatctctccttccaggcccatccctggcccagagcaggagggagggagggacgatggcggtgggtttttgtatctgaatttgctgtcttgaacataaagaatctatctgctgttggaaaaaaaaaaaaaaaaaaa

SEQ ID NO: 6999 - DNA, 2592 bp, Homo Sapiens
  NM_203281
aataaacgtgttgggggcactgagtaatgtagccatttctgacccggcagccaggaaaatgtgaaacaatttgcttctggaaacaggacagccggggccgtgttcctgcaacagcagaccaagcaccgcggcggacccaggcaagcacggaacaagctgagacggatgataatatggatacaaaatctattctagaagaacttcttctcaaaagatcacagcaaaagaagaaaatgtcaccaaataattacaaagaacggctttttgttttgaccaaaacaaacctttcctactatgaatatgacaaaatgaaaaggggcagcagaaaaggatccattgaaattaagaaaatcagatgtgtggagaaagtaaatctcgaggagcagacgcctgtagagagacagtacccatttcagattgtctataaagatgggcttctctatgtctatgcatcaaatgaagagagccgaagtcagtggttgaaagcattacaaaaagagataaggggtaacccccacctgctggtcaagtaccatagtgggttcttcgtggacgggaagttcctgtgttgccagcagagctgtaaagcagccccaggatgtaccctctgggaagcatatgctaatctgcatactgcagtcaatgaagagaaacacagagttcccaccttcccagacagagtgctgaagatacctcgggcagttcctgttctcaaaatggatgcaccatcttcaagtaccactctagcccaatatgacaacgaatcaaagaaaaactatggctcccagccaccatcttcaagtaccagtctagcgcaatatgacagcaactcaaagaaaatctatggctcccagccaaacttcaacatgcagtatattccaagggaagacttccctgactggtggcaagtaagaaaactgaaaagtagcagcagcagtgaagatgttgcaagcagtaaccaaaaagaaagaaatgtgaatcacaccacctcaaagatttcatgggaattccctgagtcaagttcatctgaagaagaggaaaacctggatgattatgactggtttgctggtaacatctccagatcacaatctgaacagttactcagacaaaagggaaaagaaggagcatttatggttagaaattcgagccaagtgggaatgtacacagtgtccttatttagtaaggctgtgaatgataaaaaaggaactgtcaaacattaccacgtgcatacaaatgctgagaacaaattatacctggcagaaaactactgttttgattccattccaaagcttattcattatcatcaacacaattcagcaggcatgatcacacggctccgccaccctgtgtcaacaaaggccaacaaggtccccgactctgtgtccctgggaaatggaatctgggaactgaaaagagaagagattaccttgttgaaggagctgggaagtggccagtttggagtggtccagctgggcaagtggaaggggcagtatgatgttgctgttaagatgatcaaggagggctccatgtcagaagatgaattctttcaggaggcccagactatgatgaaactcagccatcccaagctggttaaattctatggagtgtgttcaaaggaataccccatatacatagtgactgaatatataagcaatggctgcttgctgaattacctgaggagtcacggaaaaggacttgaaccttcccagctcttagaaatgtgctacgatgtctgtgaaggcatggccttcttggagagtcaccaattcatacaccgggacttggctgctcgtaactgcttggtggacagagatctctgtgtgaaagtatctgactttggaatgacaaggtatgttcttgatgaccagtatgtcagttcagtcggaacaaagtttccagtcaagtggtcagctccagaggtgtttcattacttcaaatacagcagcaagtcagacgtatgggcatttgggatcctgatgtgggaggtgttcagcctggggaagcagccctatgacttgtatgacaactcccaggtggttctgaaggtctcccagggccacaggctttaccggccccacctggcatcggacaccatctaccagatcatgtacagctgctggcacgagcttccagaaaagcgtcccacatttcagcaactcctgtcttccattgaaccacttcgggaaaaagacaagcattgaagaagaaattaggagtgctgataagaatgaatatagatgctggccagcattttcattcattttaaggaaagtagcaaggcataatgtaatttagctagtttttaatagtgttctctgtattgtctattatttagaaatgaacaaggcaggaaacaaaagattcccttgaaatttagatcaaattagtaattttgtttatgctgctcctgatataacactttccagcctatagcagaagcacattttcagactgcaatatagagactgtgttcatgtgtaaagactgagcagaactgaaaaattacttattggatattcattcttttctttatattgtcattgtcacaacaattaaatatactaccaagtacagaaatgtggaaaaaaaaaa

SEQ ID NO: 7000 - DNA, 2272 bp, Homo Sapiens
  NM_203283
attgggtacatgcgcagtgccgctcgcgcgggccgcgccaatcctgcagcgccttcaacaggtttcgggcggcgaattccagttctccgggttttggggctccctgcgggaggcagtgctggatctgggaatctctaggaaaggaaagagcaaaggaggggaaagatggggggctgcaggaaatttggtgagcggcctccacctaaacgacttactagggaagctatgcgaaattatttaaaagagcgaggggatcaaacagtacttattcttcatgcaaaagttgcacagaagtcatatggaaatgaaaaaaggtttttttgcccacctccttgtgtatatcttatgggcagtggatggaagaaaaaaaaagaacaaatggaacgcgatggttgttctgaacaagagtctcaaccgtgtgcatttattgggataggaaatagtgaccaagaaatgcagcagctaaacttggaaggaaagaactattgcacagccaaaacattgtatatatctgactcagacaagcgaaagcacttcatgttgtctgtaaagatgttctatggcaacagtgatgacattggtgtgttcctcagcaagcggataaaagtcatctccaaaccttccaaaaagaagcagtcattgaaaaatgctgacttatgcattgcctcaggaacaaaggtggctctgtttaatcgactacgatcccagacagttagtaccagatacttgcatgtagaaggaggtaattttcatgccagttcacagcagtggggagccttttttattcatctcttggatgatgatgaatcagaaggagaagaattcacagtccgagatggctacatccattatggacaaacagtcaaacttgtgtgctcagttactggcatggcactcccaagattgataattaggaaagttgataagcagaccgcattattggatgcagatgatcctgtgtcacaactccataaatgtgcattttaccttaaggatacagaaagaatgtatttgtgcctttctcaagaaagaataattcaatttcaggccactccatgtccaaaagaaccaaataaagagatgataaatgatggcgcttcctggacaatcattagcacagataaggcagagtatacattttatgagggaatgggccctgtccttgccccagtcactcctgtgcctgtggtagagagccttcagttgaatggcggtggggacgtagcaatgcttgaacttacaggacagaatttcactccaaatttacgagtgtggtttggggatgtagaagctgaaactatgtacaggtgtggagagagtatgctctgtgtcgtcccagacatttctgcattccgagaaggttggagatgggtccggcaaccagtccaggttccagtaactttggtccgaaatgatggaatcatttattccaccagccttacctttacctacacaccagaaccagggccgcggccacattgcagtgcagcaggagcaatccttcgagccaattcaagccaggtgccccctaacgaatcaaacacaaacagcgagggaagttacacaaacgccagcacaaattcaaccagtgtcacatcatctacagccacagtggtatcctaactaccgtctttttgctaggacttaaactgacttgagtgtggcaaaaagttaacaaaaaaggagaaaaaatgaacaatcgtttgtggtttcttgggaaaacttttcataccaggtgatactattcaaaaaccccgttgtctccctgcaagtgctgatttgaaatgcagaagccacagtaaaaaaaaaaaaaaaaaaaaaaaaaaagaaaaaaaaatcaaaatgtataaatattggaaatcaagtttttcagctgttttgttggttggttggttggtttttgtttggttttgtttaaatgggcaagaagtaaataatgtggctggaatacaagttgaacaaactagaagacacaaatctaacatagtttttatggaccaaggaacttgtatattgtataagctttagtaaaaggtacattttcaccatacctttttttatatcacggtattatagtacaccttgttaccaaataggttgttctcttccccacccacctttgagcttttgctctaaaatacattcaggttccaagcctgaccatccttgtttaatctatcatactcttccaggttttttttttttggtctaaggctggaacttttttcttttttttcagctgaagtcttatgacttttcatgagtcaaaatt

SEQ ID NO: 7001 - DNA, 2499 bp, Homo Sapiens
  NM_203284
agggaaggcagcgagcaggatcccctactctgcgggcggcgcgaggcgtctggctcttcgcggcggcggcgaggggaaagggagcgcgggggctgggtggaatcgaggagtgaggaaaaagggaaggggcgggggagagggaccagggaaggcgtcggggggaatctcgcgagggttggagttttggcgagagtttgtggaagatggcgcctgttgtgacaggtcattgaaattatgagactatcattcaaatggaagcattatagttcttcggaaccattatgatctcaaaacgaaaggagaatgatacagatacactggctgaggtgttttgaggtgcatcgaagtgttccaagctgtgacttaccttaacatgttcttgaagtaccatggcgtggattaaaaggaaatttggtgagcggcctccacctaaacgacttactagggaagctatgcgaaattatttaaaagagcgaggggatcaaacagtacttattcttcatgcaaaagttgcacagaagtcatatggaaatgaaaaaaggtttttttgcccacctccttgtgtatatcttatgggcagtggatggaagaaaaaaaaagaacaaatggaacgcgatggttgttctgaacaagagtctcaaccgtgtgcatttattgggataggaaatagtgaccaagaaatgcagcagctaaacttggaaggaaagaactattgcacagccaaaacattgtatatatctgactcagacaagcgaaagcacttcatgttgtctgtaaagatgttctatggcaacagtgatgacattggtgtgttcctcagcaagcggataaaagtcatctccaaaccttccaaaaagaagcagtcattgaaaaatgctgacttatgcattgcctcaggaacaaaggtggctctgtttaatcgactacgatcccagacagttagtaccagatacttgcatgtagaaggaggtaattttcatgccagttcacagcagtggggagccttttttattcatctcttggatgatgatgaatcagaaggagaagaattcacagtccgagatggctacatccattatggacaaacagtcaaacttgtgtgctcagttactggcatggcactcccaagattgataattaggaaagttgataagcagaccgcattattggatgcagatgatcctgtgtcacaactccataaatgtgcattttaccttaaggatacagaaagaatgtatttgtgcctttctcaagaaagaataattcaatttcaggccactccatgtccaaaagaaccaaataaagagatgataaatgatggcgcttcctggacaatcattagcacagataaggcagagtatacattttatgagggaatgggccctgtccttgccccagtcactcctgtgcctgtggtagagagccttcagttgaatggcggtggggacgtagcaatgcttgaacttacaggacagaatttcactccaaatttacgagtgtggtttggggatgtagaagctgaaactatgtacaggtgtggagagagtatgctctgtgtcgtcccagacatttctgcattccgagaaggttggagatgggtccggcaaccagtccaggttccagtaactttggtccgaaatgatggaatcatttattccaccagccttacctttacctacacaccagaaccagggccgcggccacattgcagtgcagcaggagcaatccttcgagccaattcaagccaggtgccccctaacgaatcaaacacaaacagcgagggaagttacacaaacgccagcacaaattcaaccagtgtcacatcatctacagccacagtggtatcctaactaccgtctttttgctaggacttaaactgacttgagtgtggcaaaaagttaacaaaaaaggagaaaaaatgaacaatcgtttgtggtttcttgggaaaacttttcataccaggtgatactattcaaaaaccccgttgtctccctgcaagtgctgatttgaaatgcagaagccacagtaaaaaaaaaaaaaaaaaaaaaaaaaaagaaaaaaaaatcaaaatgtataaatattggaaatcaagtttttcagctgttttgttggttggttggttggtttttgtttggttttgtttaaatgggcaagaagtaaataatgtggctggaatacaagttgaacaaactagaagacacaaatctaacatagtttttatggaccaaggaacttgtatattgtataagctttagtaaaaggtacattttcaccatacctttttttatatcacggtattatagtacaccttgttaccaaataggttgttctcttccccacccacctttgagcttttgctctaaaatacattcaggttccaagcctgaccatccttgtttaatctatcatactcttccaggttttttttttttggtctaaggctggaacttttttcttttttttcagctgaagtcttatgacttttcatgagtcaaaatt

SEQ ID NO: 7002 - DNA, 1184 bp, Homo Sapiens
  NM_203288
ggcgctgcgggggctgacatgtcgtcccggcctgggcgcgaggacgtgggggctgcgggcgcgcggcggccgcgtgagccgccggagcaggagctgcagcgacgtcgggagcagaagcggcggcgacacgacgcgcagcagctgcagcagctcaagcacctggagtccttttacgaaaaacctcctcctgggcttatcaaggaagatgagactaagccagaagattgcataccagatgtaccaggcaatgaacacgccagggaatttctggctcatgcaccaactaaaggactttggatgccactggggaaagaagtcaaagttatgcagtgttggcgttgcaaacgctatggtcaccgaacgggtgacaaagaatgccctttctttatcaaaggcaaccaaaagttagagcagttcagagtggcacatgaagatcccatgtatgacatcatacgagacaataaacgacatgaaaaggacgtaaggatacagcagttaaaacagttactggaggattctacctcagatgaagataggagcagctccagttcctctgaaggtaaagagaaacacaagaaaaagaagaagaaagaaaagcataagaaaaggaagaaagaaaagaaaaagaagaaaaaacggaagcacaaatcttccaagtcaaatgagggttctgactcagagtgacaaggatgtgacttgttcaacattctcttctcaaacactgaccaaggaacagaggaagatgcagtcagagaaagcagcaggatagagacgccgagagaggagtatatgtgggtcacagcagtgagctcccacccgccttgcagtgaagatgtgaccccaggagagggagtgtctccttccaggtgctagctctggacagcagctgattttaggcaggaaagtttcttcatcgttgtcctccctgctggtcacatgagtttacgattcctttgaagtgtctcccacagggtggcaggactgggagaatctctgaggcgtgtcttccaggccctcccacagcttgtgccctccacagtgtggactcaggtcccatagacatcaggctggagtcttctctgttgttgagaataataaaagctcattatttattttttaaaaaaaaaaaaaaaaaaaaaaaaaaaaaaaaaaaaaaaaaaaaaaaaaaaaaaaaaaaaaaaaaa

SEQ ID NO: 7003 - DNA, 1322 bp, Homo Sapiens
  NM_203290
agggctactaggacgcacgcgcgagatagaacctctagtctcgtggagagattgaagatggcggcttctcaggcggtggaggaaatgcggagccgcgtggttctgggggagtttggggttcgcaatgtccatactactgactttcccggtaactattccggttatgatgatgcctgggaccaggaccgcttcgagaagaatttccgtgtggatgtagtacacatggatgaaaactcactggagtttgacatggtgggaattgacgcagccattgccaatgcttttcgacgaattctgctagctgaggtgccaactatggctgtggagaaggtcctggtgtacaataatacatccattgttcaggatgagattcttgctcaccgtctggggctcattcccattcatgctgatccccgtctttttgagtatcggaaccaaggagatgaagaaggcacagagatagatactctacagtttcgtctccaggtcagatgcactcggaacccccatgctgctaaagattcctctgaccccaacgaactgtacgtgaaccacaaagtgtataccaggcatatgacatggatccccctggggaaccaggctgatctctttccagagggcactatccgaccagtgcatgatgatatcctcatcgctcagctgcggcctggccaagaaattgacctgctcatgcactgtgtcaagggcattggcaaagatcatgccaagttttcaccagtggcaacagccagttacaggctcctgccagacatcaccctgcttgagcccgtggaaggggaggcagctgaggagttgagcaggtgcttctcacctggtgttattgaggtgcaggaagtccaaggtaaaaaggtggccagagttgccaacccccggctggataccttcagcagagaaatcttccggaatgagaagctaaagaaggttgtgaggcttgcccgggttcgagatcattatatcttctctgttgagtcaacgggggtgttgccaccagatgtgctggtgagtgaagccatcaaagtactgatggggaagtgccggcgcttcttggatgaactagatgcggttcagatggactgagcttggatgcttctgaggcaagctgaagctttgggttctgactgacccaccctacaggactgctgaacagagagcccagtgtgactagggatcctgagttttctgggacaattccagctttaatcaatacattttgttaaatgtgccataaaatgagactttttacgcctttataaggccttagatgtaaataaactcacccaaacaaaaaaaaaaaaaaaaaa

SEQ ID NO: 7004 - DNA, 844 bp, Homo Sapiens
  NM_203298
aaagcctgccgggagcttggtgcgctatggcgacacccagcctgcggggtcgtctggcgcggtttgggaacccgcggaagcctgtgctgaagcccaataaacctctcattctagctaaccgcgtcggggagcggcgccgggagaagggcgaggcgacttgcatcacggagatgtcggtgatgatggcttgctggaagcagaatgaattccgcgacgatgcgtgcagaaaagagatccagggcttcctcgattgtgccgcgagggctcaggaagcccgaaagatgagatcaatacaggaaaccctgggagagtctgggagtttacttccaaataaattgaataagttgttacagaggtttcctaacaaaccttacctcagctgaaaatggacaagtattttcaatgactgaaatatagcttctgacaactatgcagaggcattttagagacattggcattgccatgccctctttggagggtagaagaggcaaaacacttttttcaccctttggaatcatagtatgggtagaagttatgatttatcttgaaataaaatcctctgaacagaacttggccttttgttgtgaattaggtactctcttcattcttgagcctcccctagaccctggaaattctttccttcctgatttgccctaggagcaggacaaataccgttgtattgtctttccctgcatttgaagtcttttacaccatttagtgcccttgcttttggatgcaataaggaagttgaagttgccttcgtctgtaaatacttagtgattgcctattttgtgcgtagtccctgcaaggtgctctctgaataataaagttaacaaactggtga

SEQ ID NO: 7005 - DNA, 6971 bp, Homo Sapiens
  NM_203327
cattcatcttctcctgcccttggacatcacagctccaggaactcagatcttcagactcagggtgaaggacaccaccagctttccaggttccccagcttgcagacggcatacgctaggtcttgactccactaacggggacttctcatacggctttgaacttggaccttggtgcataagcaaatgtaactcagcgaattgtaatggaaagcatatggacaggtctacgccacatcacttaggtgctaagagatgccgtttgcaggcctcatctctgcttgagaatcgggggctccaggcactagaagagccggctgatcctgggctcctagcttgaataagccttcacttccagctgctctccccaacggctgtgtaaactactcgtttctcttaatgatgggtattggtaagaataccacatccaaatcaatggaggctggaagttcaacagaaggcaaatacgaagacgaggcaaagcacccagctttcttcactcttccggtggtgataaatggaggcgccacctccagcggtgagcaggacaatgaggacactgagctcatggcgatctacactacggaaaacggcattgcagaaaagagctctctcgctgagaccctggatagcactggcagtctggacccccagcgatcagacatgatttataccatagaagatgttcctccctggtacctgtgtatatttctggggctacagcactacctgacatgcttcagcggcacgatcgcagtgcccttcctgttggccgatgccatgtgtgtggggtacgaccagtgggccaccagccagctcattgggaccattttcttctgtgtgggaatcactactttgctacagacaacgtttggatgcaggttacccctgtttcaggccagtgcttttgcatttttggcccctgctcgagccatcctgtctttagataaatggaaatgtaacaccacagatgtttcagttgccaatggaacagcagagctgttgcacacagaacacatctggtatccccggatccgagagatccagggggccatcatcatgtcctcactgatagaagtagtcatcggcctcctcggcctgcctggggctctactgaagtacatcggtcccttgaccattacacccacggtggccctaattggcctctctggtttccaggcagcgggggagagagccgggaagcactggggcattgccatgctgacaatattcctagtattactgttttctcaatacgccagaaatgttaaatttcctctcccgatttataaatccaagaaaggatggactgcgtacaagttacagctgttcaaaatgttccctatcatcctggccatcctggtatcctggctgctctgcttcatcttcacggtgacagatgtcttccctcccgacagcacaaagtatggcttctatgctcgcacagatgccaggcaaggcgtgcttctggtagccccgtggtttaaggttccatacccatttcagtggggactgcccaccgtgtctgcggccggtgtcatcggcatgctcagtgccgtggtcgccagcatcatcgagtctattggtgactactacgcctgtgcacggctgtcctgtgccccacccccccccatccacgcaataaacaggggaattttcgtggaaggcctctcctgtgttcttgatggcatatttggtactgggaatggctctacttcatccagtcccaacattggagttttgggaattacaaaggtcggcagccgccgcgtgatacagtgcggagcagccctcatgctcgctctgggcatgatcgggaagttcagcgccctctttgcgtcccttccggatcctgtgctgggagccctgttctgcacgctctttggaatgatcacagctgttggcctctctaacctgcagttcattgatttaaattcttcccggaacctctttgtgcttggattttcgatcttctttgggctcgtccttccaagttacctcagacagaaccctctggtcacagggataacaggaatcgatcaagtgttgaacgtccttctcacaactgctatgtttgtagggggctgtgtggcttttatcctggataacaccatcccaggcactccagaggaaagaggaatccggaaatggaagaagggtgtgggcaaagggaacaaatcactcgacggcatggagtcgtacaatttgccatttggcatgaacattataaaaaaatacagatgcttcagctacttacccatcagcccaacctttgtgggctacacatggaaaggcctcaggaagagcgacaacagccggagttcagatgaagactcccaggccacgggatagcctttgctgtgccctgtggcctggccgcagtgaggcatgtatctgtagttccttgctgagtaacaagaagtaaaatacatgtttgtatatctacatttacattctgcgccccagagctaagacagactgcgaatcacttttctgctgtgagggtgatggtgcctgatgcggtgtctcgcctatctccttatttaagcccttaactccttgccctttgagagtgtccattgctggccatggtcactaaatttgaagttccagtcctccctttggagtggacatttaaaatctgcagccattccttgcttcagttcccttccaccacccagggctggctttcctataagccacctccagggtccaggggctttctctctctctccgaagcccctggacctgtttccttgtcatttgaccctcgtctgtgcccgcggagacctcctctgaccaaggggcactagtatgccttgcgctatcatgactgactggcccagtatgattctgttgtcgctgatctcccggaggaggaggctgttgacctgaaaacagtggcgtggctcccctgtgcccagatctggccatgggtgaggcctgcacagatgttgaatgaacatctgtttggggcattggagggaaaaggaaaggaccctgaagccaatatctgattctcggctgcaccttctcttggccaccctggccctgaccgggccagcacgtgcacactggcctcttttcatttcactagtggccgagacaccctctctggcatttatcactgttggccggtgtgatgagtatagagtgccacccaaggcaccagtcacacaagctgatgggcgtcttggctctgccgtcatgtggatgttattgtcgcgcgcgtctataattacaaggttttattcctatttaatgttattgactatagcagattttggaaatcagtgttttccatgtgaccctctttccttgcatccctattccttgtcccccacccactcttccccccatcaagaaaagaaccagcatttgtaaagctgtggacaccatcagggaagcttgttgtaacggcttttgaaggccagtaaccattgttgtggttgtgttttgtattgcttgataccatgaaagtgtaaatactgtaatgcctaatctatttatcaaaactgactactggaccggagcccagaaaccatgggtcaagttacacgtgaatttgttttgtgaagaagggaagctggggcaggtaacacgcagagccgccacgtggaacggtctgtccgccggtctgtcccgcttgccgggcttctgttgcaagtcttggcttaaggagacttcctgtgggttgccatgtcgcacgtccgttagatcttgattttacaggtgagggtggttgccaaaggtgataagaaaagcagccaacaggctccctctcacttaagagagttctaattaataacactaaattcttcctgagaaatgactcctcttggtttggtttgaagtttttcagtgaaggaaaaggcctgagataggaagcagtgccctcgcttcatgaggtggcacatcttcggtggccgttggcctggtcgagctttggtcagctgcgtgggtgcctgtctcctgtctccagcggcagggcatggttcttggcagcctggtgtccacacggtgcattcctgtccccctcggccccaggctggctcagctctccagtgctgcggcgctgtctttgcagcattgccatgtcaccgtagcccccttcactcttggaagtttggggcttcaaggtttattctggcaagaacacctcggagccactgcattgttttgccaaaaacttactgcagattaagtaaagaacttagatgctaaattacatctaattttgtatgtttttttaaatgtgtctttgatgcatactttagaagcacactggctcgcggtttccatccctcttgccttgggacactcttgaggctggcagccctcctgcaatgagttgctctcagttccttctgtttggattttgctcaacatctccagtttctctgctctgaaaaatggggaaaactgctaaacatcccagagatttgcaatcttctagctctccaggtgagcagaaagaccaaatatccaaataaaagcctgaaagccattggtgatccaggggcaccttctcttcagcttgactgggcgtcttccgctgcataacactcaaggtgtctgctctagtcatccagaaacccactcccttctgaagcccctccttgggccgggttgtatcaggaggattcaaccccgctaacatgtggggtgccctctgtaggccttcacacagggaaggaagccctaccctttcaactcctgttggagtgagagtttcctgttctgattccactgtggccaacccaataattctgtccgaggaggggtaagggaataggaggtggggagcaaagagggcagcctgactagatgcccctgctgaatctggtactttctgcacagccttgagtgattggagtcccctaatgactaataaacttgaacatgtaacacacacacacacacacacacacaccattttaggaagtggttctcctactggaaaatatgctacagaatgaaagtttgtaattgaaagaaaaagaatgtattcatctgcttcttgggtttaagcacacacctgaaggggagatattgggggacacggtggccactcgcggtctgtgtcatgacacttcccattcacatcattggcctgcgttgctggggctttgaaccaccaccccgtactttgttttgcctgtagagtgttgtaaaatattttggatgtgaatgtccttgcaggccggttagtctccagtttccacagagaccacctacccaccaccttcccaggtcacctgcctggtccctgaaagaaagcatttgtgtgggcaatcccaacatgaaatgtagacagcgtgaatacggacaggaggtgatgccatattcacagtgggggatggagggcccccacccctgcttcacagaataatgggaagtgactctagtctttgtaagcaattttcattctcattaggaagttaaatgtagattcacagatacatttactttcagaatcctcaagaggatttcaaatgctaacttttagtttcttgggattgatcaaggcaagagaagtggctttaaccatgccagccagaatgaagcatcatgggtcctgatggtttcccgttttcatggtaacaaattcgcacagaggttttgctttatgctgtagaataccgactttcatgatgacaacttggtttatgcatgaatattgcagtatttccatatagcaaaataacatttctacccaggataatagtcacagttttccagggagggaatgatataattttcatgacaatgtcatgtgatgatagaatttctccattgatgaatctctagtatgtgtgtatactttatttacccatacgtatattttatgaccatgagctaagttgttatttctttcattcatatccctgctgaaatattggtactagcaacttaaagttggcaagtctcatcttcagtaatacggatgccatgggagtggccaggccagattgaaggtgaatatggagcagtagcagaagcctcattccagaacccatctggccagagaagcagcagcatcctgggggatggccgtgcatggggtgtacactcgctataggcataggcccggcatggctgtcgctggacgccagctgtgcacacccagccacacctgctgcacgccgcgttagtgtgcggctccgggcctgagcattcgcaaagctcgcttctccagggagcctcctcttggctttggaaaagagcccagggacttaacgtgctgcctgttgtactctgtcccctcatgactttttagacacagggactaggacatcgaccaccctctgcccctcctgcagtcagaacccgagtagtgcaagaacggccacccggttttgccagcgttcagcgtctgcccatggacccataaggcacattagcgttgggggtctcttttcagcagcctcacagacattcccgtcctttctggttggtgttgactgtgtttcagcatcactctaccctcccatgtccttagcattgctgtgcgtgtttccaggcacttaggacacccttccccacgttgccatcttactgacagttcaaatgactctccttttttgttcgttagtaacaatcttcatttgacaccttaatacatttctgactgttcttaaaacagtggggatgcctatattttccttgagtttttgtgactgactttggctatatatacctttctggggttttgtttgttttttatttttattttgattaccgagggtatttggggtggggttgttttttgagatgtgtaattcttttatggagtttttaaaaagaattttcatattgtttttctaacatggcttcattaaacgtttaagtattttaaaaatatgtaatatttggaccagatgttgtgaataatagtagagataaagctattttattctgtatttttaaaactgttccgtacaaataaaagctctcctggacacagtaaaaaaaaa

SEQ ID NO: 7006 - DNA, 3551 bp, Homo Sapiens
  NM_203355
cgcctccccgccttctcgcggctgcccggccgaaaccaaaccgaggggtggggtggcgaggacagggtacgtcgcaggcttgtgcgggtcgggctcggacctgcgctgcctcgggatgtaaagtataacaagagggtcgggatgggcagcgtaggcctgtgaggcctgcgggtgcccctgtcccccagctccccccgcagccggctccgcagtggtccactccggttgccgggtgcggattcgggttccggaccgaaggctgtgtgttctccgccgtttattgtggccccgacaggccggggttactgtggcgaccacgagagcagctttggcgctatggaggagcccggggttacccctcaaccgtatttggggctgctcctggaggagctacgcagggttgtggcagcactgcctgaaggtatgagaccagattctaatctttatggttttccatgggaattggtgatatgtgcagctgttgttggattttttgctgttctcttttttttgtggagaagttttagatcggttaggagtcggctttatgtgggacgagagaaaaagcttgctctaatgctttctggactaattgaagaaaaaagtaaactacttgaaaaatttagccttgttcaaaaagagtatgaaggctatgaagtagagtcatctttaaaggatgccagctttgagaaggaggcaacagaagcacaaagtttggaggcaacctgtgaaaagctgaacaggtccaattctgaacttgaggatgaaatactctgtctagaaaaagagttaaaagaagagaaatccaaacattctgaacaagatgaattgatggcggatatttcaaaaaggatacagtctctagaagatgagtcaaaatccctcaaatcacaagtagctgaagccaaaatgaccttcaagatatttcaaatgaatgaagaacgactgaagatagcaataaaagatgctttgaatgaaaattctcaacttcaggaaagccagaaacagcttttgcaagaagctgaagtatggaaagaacaagtgagtgaacttaataaacagaaagtaacatttgaagactccaaagtacatgcagaacaagttctaaatgataaagaaagtcacatcaagactctgactgaacgcttgttaaagatgaaagattgggctgctatgcttggagaagacataacggatgatgataacttggaattagaaatgaacagtgaatcggaaaatggtgcttacttagataatcctccaaaaggagctttgaagaaactgattcatgctgctaagttaaatgcttctttaaaaaccttagaaggagaaagaaaccaaatttatattcagttgtctgaagttgataaaacaaaggaagagcttacagagcatattaaaaatcttcagactgaacaagcatctttgcagtcagaaaacacacattttgaaaatgagaatcagaagcttcaacagaaacttaaagtaatgactgaattatatcaagaaaatgaaatgaaactccacaggaaattaacagtagaggaaaattatcggttagagaaagaagagaaactttctaaagtagatgaaaagatcagccatgccactgaagagctggagacctatagaaagcgagccaaagatcttgaagaagaattggagagaactattcattcttatcaagggcagattatttcccatgagaaaaaagcacatgataattggttggcagctcggaatgctgaaagaaacctcaatgatttaaggaaagaaaatgctcacaacagacaaaaattaactgaaacagagcttaaatttgaacttttagaaaaagatccttatgcactcgatgttccaaatacagcatttggcagaggctcacgaggcccagggaatcctctggaccatcagattaccaatgaaagaggagaatcaagctgtgataggttaaccgatcctcatagggctccctctgacactgggtctctgtcacctccatgggaccaggaccgtaggatgatgtttcctccgccaggacaatcatatcctgattcagcccttcctccacaaaggcaagacagattttgttctaattctggtagactgtctggaccagcagaactcagaagttttaatatgccttctttggataaaatggatgggtcaatgccttcagaaatggaatccagtagaaatgataccaaagatgatcttggtaatttaaatgtgcctgattcatctctccctgctgaaaatgaagccactggccctggctttgttcctccacctcttgctccaatcagaggtccattgtttccagtggatgcaagaggcccattcttgagaagaggacctcctttccccccacctcctccaggagccatgtttggagcttctcgagattattttccaccaggggatttcccaggtccaccacctgctccatttgcaatgagaaatgtctatccaccgaggggttttcctccttaccttcccccaagacctggatttttccccccacccccacattctgaaggtagaagtgagttcccctcaggtttgattccaccttcaaatgagcctgctactgaacatccagaaccacagcaagaaacctgacaatatttttgctctcttcaaaagtaattttgactgatctcattttcagtttaagtaactgctgttacttaagtgattacacttttgctcaaattgaagcttaatggaattataattctcaggatagtattttgtaaataaagatgatttaaatatgaatcttatgagtaaattatttcaattttattttagacggtataactatttcaatttgattaatccactattatataaacaatagtgggagttttatatatgtaatctttcaggtggggaggctttaaattctgaagtctgtgtctttatgccaagaactgtatttactgtggttgtggacaaatgtgaaagtaactttatgcttaaataaattatagttgatttaaagatttgtttggcattgataataataaaatcagtagtttttctataactatggctctattaacttttttccttttaccaataactttgaggtgcaaaactcaaacttatgtgggtcttttgtgttcaattatgttatgacaaatgtgctctctttcttgtaaatagacatgagtggcccaaagcaacaaattaatacacttttaaaagtcaaaattgattatattttaaagataaccaggatattatctaatggtgaattgtagaattttgatcttcttattcactgagtttcttgcacggtttctttattgcttttttttccccgcctgttcttttgtaaggtatttactattttctgtggaggatattgagatgtactacaggataactgtagtgaatgatgtgtcatcattttgagctttggactcaatatctttagtgtttccctaaatcagatttgtaggtcatgttaagcttcttgcacattaatatgattatggaaggaaaggcagtgaagcataactaataaacatcataatacttaa

SEQ ID NO: 7007 - DNA, 4262 bp, Homo Sapiens
  NM_203372
gtcccaggcggttccgctcaacagacgctgctgtggctgcgccgggctgcgacactgcagttgtctacgcggccggggccgggacgaggaggcgttggacggggtcgcatacgttcgtcccctcgcattgcggccccgacagctgcgccaggatccccgggcggcggcgcggggcgtgaacgctctggggctcagccaggcctgcgcgggcccgaggccggaggaacccggactccggcgtagcggttttgacacaagggcgcatatcttcaaagcacctagtacctcctaccattgtcaactgattctcgctgaagtctgttaattctactttttgagtacttatgaataaccacgtgtcttcaaaaccatctaccatgaagctaaaacataccatcaaccctattcttttatattttatacattttctaatatcactttatactattttaacatacattccgttttattttttctccgagtcaagacaagaaaaatcaaaccgaattaaagcaaagcctgtaaattcaaaacctgattctgcatacagatctgttaatagtttggatggtttggcttcagtattataccctggatgtgatactttagataaagtttttacatatgcaaaaaacaaatttaagaacaaaagactcttgggaacacgtgaagttttaaatgaggaagatgaagtacaaccaaatggaaaaatttttaaaaaggttattcttggacagtataattggctttcctatgaagatgtctttgttcgagcctttaattttggaaatggattacagatgttgggtcagaaaccaaagaccaacatcgccatcttctgtgagaccagggccgagtggatgatagctgcacaggcgtgttttatgtataattttcagcttgttacattatatgccactctaggaggtccagccattgttcatgcattaaatgaaacagaggtgaccaacatcattactagtaaagaactcttacaaacaaagttgaaggatatagtttctttggtcccacgcctgcggcacatcatcactgttgatggaaagccaccgacctggtccgagttccccaagggcatcattgtgcataccatggctgcagtggaggccctgggagccaaggccagcatggaaaaccaacctcatagcaaaccattgccctcagatattgcagtaatcatgtacacaagtggatccacaggacttccaaagggagtcatgatctcacatagtaacattattgctggtataactgggatggcagaaaggattccagaactaggagaggaagatgtctacattggatatttgcctctggcccatgttctagaattaagtgctgagcttgtctgtctttctcacggatgccgcattggttactcttcaccacagactttagcagatcagtcttcaaaaattaaaaaaggaagcaaaggggatacatccatgttgaaaccaacactgatggcagcagttccggaaatcatggatcggatctacaaaaatgtcatgaataaagtcagtgaaatgagtagttttcaacgtaatctgtttattctggcctataattacaaaatggaacagatttcaaaaggacgtaatactccactgtgcgacagctttgttttccggaaagttcgaagcttgctagggggaaatattcgtctcctgttgtgtggtggcgctccactttctgcaaccacgcagcgattcatgaacatctgtttctgctgtcctgttggtcagggatacgggctcactgaatctgctggggctggaacaatttccgaagtgtgggactacaatactggcagagtgggagcaccattagtttgctgtgaaatcaaattaaaaaactgggaggaaggtggatactttaatactgataagccacaccccaggggtgaaattcttattgggggccaaagtgtgacaatggggtactacaaaaatgaagcaaaaacaaaagctgatttctttgaagatgaaaatggacaaaggtggctctgtactggggatattggagagtttgaacccgatggatgcttaaagattattgatcgtaaaaaggaccttgtaaaactacaggcaggggaatatgtttctcttgggaaagtagaggcagctttgaagaatcttccactagtagataacatttgtgcatatgcaaacagttatcattcttatgtcattggatttgttgtgccaaatcaaaaggaactaactgaactagctcgaaagaaaggacttaaagggacttgggaggagctgtgtaacagttgtgaaatggaaaatgaggtacttaaagtgctttccgaagctgctatttcagcaagtctggaaaagtttgaaattccagtaaaaattcgtttgagtcctgaaccgtggacccctgaaactggtctggtgacagatgccttcaagctgaaacgcaaagagcttaaaacacattaccaggcggacattgagcgaatgtatggaagaaaataattattctcttctggcatcagtttgctacagtgagctcagatcaaataggaaaatacttgaaatgcatgtctcaagctgcaaggcaaactccattcctcatattaaactattacttctcatgacgtcaccatttttaactgacaggattagtaaaacattaagacagcaaacttgtgtctgtctcttctttcattttccccgccaccaacttactttaccacctatgactgtacttgtcagtatgagaatttttctgaatcatattggggaagcagtgattttaaaacctcaagtttttaaacatgatttatatgttctgtataatgttcagtttgtaactttttaaaagtttggatgtatagagggataaataggaaatataagaattggttatttgggggcttttttacttactgtatttaaaaatacaagggtattgatatgaaattatgtaaatttcaaatgcttatgaatcaaatcattgttgaacaaaagatttgttgctgtgtaattattgtcttgtatgcatttgagagaaataaatatacccatacttatgttttaagaagttgagatcttgtgaatatatgcctgtcagtgtcttctttatatatttattttttattagaaaaaatgaagtttggttggtgatgcatgaaacaaaatagcaagagagggttatagtttaatagtaagggagataacacagcatgtgtagcaccagttgataattggtctctagtagcttactgtcaaaatgttcaatgaagtcttctgttcatctgttgaaactaggaaaatacccaaacttaaatggaagaattctgaaagagaggatagaatttaaagaacaagagtatataaagttattctttgaatatttcgttgactatatgtacattgagttatctatatttgtaaacaaattagtcatggaaaattattctatctcaaagtctccttttagtctagataatcattatttcattttaaaattagtgtttttcctagtttgcactgatgcgtgtatggatgtgtgtgagtcagtggtagcttatttaaaaagcaccttatcctttctcccataacctttgtacactaaaaaatgaaagaatttagaatgtatttgatgatagcattctcactaagacacatgagaatttaactttataaccgcgtgagttaagatttaattcataggttttgatgtcattgttgaagttatttgtaattcagaaaccttgcttgtgtgatacatagtctcttcatttattactgcttgtctgttgttatatctggattatcaaaagcaatagtgcaccaattaagatgtgctcaaatcaggacttaaatcataggcaccacatttttcatgtcagactagttactttgttgattctcagttactgtaggcatcaaaaggcaaaaatcaaaaaaaaaaaaaacaaaaacaaaaaaaaagatgaacctaggtctgtgtaaagtaaggggagtgttaggagcagccaggactgtgtagtgtgtgtttggttgcatcacaaacatcgtatgtggagacattgcaatacagtgttttttgttttcaacttttcttgtattgtatatttgtattatgttttgaatgcttttctcttttcataattaaatattaatgtttgggataactgccaagaagaagtaaaaatattgaatggaacttctatatgaggatgctgtgatctaaaaattaaatctcagtgggcggagaaaaaaaaa

SEQ ID NO: 7008 - DNA, 3233 bp, Homo Sapiens
  NM_203379
agtcctaggagctgtggaaagagtagaagtgcctgaatgtggtgctgaatcaatacagccagctgtgaggggagcacttcctggacccaggaagggagagtcttcttccaaggtctgaatttcctgctgctgttcacaaagatgctttttatctttaactttttgttttccccacttccgaccccggcgttgatctgcatcctgacatttggagctgccatcttcttgtggctgatcaccagacctcaacccgtcttacctcttcttgacctgaacaatcagtctgtgggaattgagggaggagcacggaagggggtttcccagaagaacaatgacctaacaagttgctgcttctcagatgccaagactatgtatgaggttttccaaagaggactcgctgtgtctgacaatgggccctgcttgggatatagaaaaccaaaccagccctacagatggctatcttacaaacaggtgtctgatagagcagagtacctgggttcctgtctcttgcataaaggttataaatcatcaccagaccagtttgtcggcatctttgctcagaataggccagagtggatcatctccgaattggcttgttacacgtactctatggtagctgtacctctgtatgacaccttgggaccagaagccatcgtacatattgtcaacaaggctgatatcgccatggtgatctgtgacacaccccaaaaggcattggtgctgatagggaatgtagagaaaggcttcaccccgagcctgaaggtgatcatccttatggacccctttgatgatgacctgaagcaaagaggggagaagagtggaattgagatcttatccctatatgatgctgagaacctaggcaaagagcacttcagaaaacctgtgcctcctagcccagaagacctgagcgtcatctgcttcaccagtgggaccacaggtgaccccaaaggagccatgataacccatcaaaatattgtttcaaatgctgctgcctttctcaaatgtgtggagcatgcttatgagcccactcctgatgatgtggccatatcctacctccctctggctcatatgtttgagaggattgtacaggctgttgtgtacagctgtggagccagagttggattcttccaaggggatattcggttgctggctgacgacatgaagactttgaagcccacattgtttcccgcggtgcctcgactccttaacaggatctacgataaggtacaaaatgaggccaagacacccttgaagaagttcttgttgaagctggctgtttccagtaaattcaaagagcttcaaaagggtatcatcaggcatgatagtttctgggacaagctcatctttgcaaagatccaggacagcctgggcggaagggttcgtgtaattgtcactggagctgcccccatgtccacttcagtcatgacattcttccgggcagcaatgggatgtcaggtgtatgaagcttatggtcaaacagaatgcacaggtggctgtacatttacattacctggggactggacatcaggtcacgttggggtgcccctggcttgcaattacgtgaagctggaagatgtggctgacatgaactactttacagtgaataatgaaggagaggtctgcatcaagggtacaaacgtgttcaaaggatacctgaaggaccctgagaagacacaggaagccctggacagtgatggctggcttcacacaggagacattggtcgctggctcccgaatggaactctgaagatcatcgaccgtaaaaagaacattttcaagctggcccaaggagaatacattgcaccagagaagatagaaaatatctacaacaggagtcaaccagtgttacaaatttttgtacacggggagagcttacggtcatccttagtaggagtggtggttcctgacacagatgtacttccctcatttgcagccaagcttggggtgaagggctcctttgaggaactgtgccaaaaccaagttgtaagggaagccattttagaagacttgcagaaaattgggaaagaaagtggccttaaaacttttgaacaggtcaaagccatttttcttcatccagagccattttccattgaaaatgggctcttgacaccaacattgaaagcaaagcgaggagagctttccaaatactttcggacccaaattgacagcctgtatgagcacatccaggattaggataaggtacttaagtacctgccggcccactgtgcactgcttgtgagaaaatggattaaaaactattcttacatttgttttgcctttcctcctatttttttttaacctgttaaactctaaagccatagcttttgttttatattgagacatataatgtgtaaacttagttcccaaataaatcaatcctgtctttcccatcttcgatgttgctaatattaaggcttcagggctacttttatcaacatgcctgtcttcaagatcccagtttatgttctgtgtccttcctcatgatttccaaccttaatactattagtaaccacaagttcaagggtcaaagggaccctctgtgccttcttctttgttttgtgataaacataacttgccaacagtctctatgcttatttacatcttctactgttcaaactaagagatttttaaattctgaaaaactgcttacaattcatgttttctagccactccacaaaccactaaaattttagttttagcctatcactcatgtcaatcatatctatgagacaaatgtctccgatgctcttctgcgtaaattaaattgtgtactgaagggaaaagtttgatcataccaaacatttcctaaactctctagttagatatctgacttgggagtattaaaaattgggtctatgacatattgtccaaaaggaatgctgttcttaaagcattatttacagtaggaactggggagtaaatctgttccctacagtttgctgctgagctggaagctgtgggggaaggagttgacaggtgggcccagtgaacttttccagtaaatgaagcaagcactgaataaaaacctcctgaactgggaacaaagatctacaggcaagcaagatgcccacacaacaggcttattttctgtgaaggaaccaactgatctcccccacccttggattagagttcctgctctaccttacccacagataacacatgttgtttctacttgtaaatgtaaagtctttaaaataaactattacagatacttaaaaaaaaaaaaaaaaaaa

SEQ ID NO: 7009 - DNA, 1884 bp, Homo Sapiens
  NM_203385
ggctgcgcctgcgtggttcgtcctcacgtggccgtcaagccctctagtgccttagattccagcgagctacgcaagcaatcctggcccagccgagcttgcttccccaaatcccgtaatccttgaccttattcccccaaagaagcggcctcccgggaaggagcgccctggcggagaagactcgaacggctcccacagccgggcgttgggggaaagaatctccggcctgtgaaactgtgaggggattcggccaagacgtcctcttccctctgcctcccacccaggccactcttcacctccaccatgagcctggacatccagagcctggacatccagtgtgaggagctgagcgacgctagatgggccgagctcctccctctgctccagcagtgccaagtggtcaggctggacgactgtggcctcacggaagcacggtgcaaggacatcagctctgcacttcgagtcaaccctgcactggcagagctcaacctgcgcagcaacgagctgggcgatgtcggcgtgcattgcgtgctccagggcctgcagaccccctcctgcaagatccagaagctgagcctccagaactgctgcctgacgggggccggctgcggggtcctgtccagcacactacgcaccctgcccaccctgcaggagctgcacctcagcgacaacctcttgggggatgcgggcctgcagctgctctgcgaaggactcctggacccccagtgccgcctggaaaagctgcagctggagtattgcagcctctcggctgccagctgcgagcccctggcctccgtgctcagggccaagccggacttcaaggagctcacggttagcaacaacgacatcaatgaggctggcgtccgtgtgctgtgccagggcctgaaggactccccctgccagctggaggcgctcaagctggagagctgcggtgtgacatcagacaactgccgggacctgtgcggcattgtggcctccaaggcctcgctgcgggagctggccctgggcagcaacaagctgggtgatgtgggcatggcggagctgtgcccagggctgctccaccccagctccaggctcaggaccctgtggatctgggagtgtggcatcactgccaagggctgcggggatctgtgccgtgtcctcagggccaaggagagcctgaaggagctcagcctggccggcaacgagctgggggatgagggtgcccgactgctgtgtgagaccctgctggaacctggctgccagctggagtcgctgtgggtgaagtcctgcagcttcacagccgcctgctgctcccacttcagctcagtgctggcccagaacaggtttctcctggagctacagataagcaacaacaggctggaggatgcgggcgtgcgggagctgtgccagggcctgggccagcctggctctgtgctgcgggtgctctggttggccgactgcgatgtgagtgacagcagctgcagcagcctcgccgcaaccctgttggccaaccacagcctgcgtgagctggacctcagcaacaactgcctgggggacgccggcatcctgcagctggtggagagcgtccggcagccgggctgcctcctggagcagctggtcctgtacgacatttactggtctgaggagatggaggaccggctgcaggccctggagaaggacaagccatccctgagggtcatctcctgaggctcttcctgctgctgctctccctggacgaccggcctcgaggcaaccctggggcccaccagcccctgccatgctctcaccctgcatatcctaggtttgaagagaaacgctcagatccgcttatttctgccagtatattttggacactttataatcattaaagcactttcttggcaggaaaaaaaaaaaaaaaaaaaa

SEQ ID NO: 7010 - DNA, 5115 bp, Homo Sapiens
  NM_203390
gggcagtgggcgccatcttcttctgggctcactgagggtctacctgttttggggaggctgctgcgacgaagagttccctcagcctccggccttgtgtgtccgactcggcagcagtgttaagttgcttttacagagttaacaggtctccaagaaattttaaaaaaggtcattattgctgtggtttgagctcagcatggctgtagtcatccgtttactggggcttccttttattgcggggcctgtggatattcgtcacttcttcacgggattgactattcctgatggaggagtgcatataattggaggggaaattggggaggcttttattatttttgcaacagatgaagatgcaagacgtgccataagtcgttcaggagggtttatcaaggattcatctgtagagctctttcttagtagcaaggcagaaatgcagaagactatagaaatgaaaagaactgatcgtgtaggaagagggcgtccaggatctgggacatcaggggttgacagcctgtctaattttattgagtctgttaaggaagaagcaagtaattctggatatggctcttcaattaatcaagatgctgggtttcatactaatggtacaggacatggtaatttaaggccaagaaagacaaggccattgaaggccgagaatccttacttgtttctacgaggtttgccttacctagtaaatgaagatgatgtacgtgtctttttctctggtttgtgcgtggatggagtaattttcttaaaacatcatgatggccgaaataatggtgatgccatagtaaaatttgcttcatgtgttgatgcttcaggaggtcttaaatgtcatagaagttttatgggttcaagatttatagaagtaatgcaaggatcagaacaacagtggattgagtttggtggtaatgcagttaaggagggtgacgttcttaggagatctgaagaacattctccaccaagaggaattaatgatagacattttcgaaaacggtctcattcaaaatctcccagaagaacacgttctcgttcccctcttggattttatgttcacttaaaaaatctgtccctcagtattgacgaaagagatttaagaaatttctttagaggtactgatctgactgatgaacagattaggtttttatataaagatgaaaatagaacaagatatgcctttgtgatgttcaagactctgaaagactataataccgctctgagtttacataagactgttttacaatatcgtccagttcatattgatccaatttctagaaaacaaatgctgaagttcattgcacgttatgaaaagaagagatcagggtcactagagagagataggcccggacatgtttcacaaaaatactctcaagaaggtaactctggccagaaactgtgcatctatataagaaattttccatttgatgttacaaaagttgaagtgcagaagttctttgcagactttcttcttgctgaggatgacatttacttgctttatgatgacaaaggtgttggtctgggagaagcattagtgaaatttaaatcagaagaacaggccatgaaagctgaacgtttaaaccgacgaagattcctagggacagaggtgttattaagacttatatctgaggcacaaatacaggagtttggtgtaaatttttctgtgatgtccagtgaaaaaatgcaagctcgctcacagtcacgtgagcgaggtgaccattcccatttatttgactcaaaagacccaccaatatactcagttggtgcttttgaaaactttagacatcagctagaggacttgaggcaactggataacttcaagcatccccagagggatttccggcagcctgacaggcaccctccagaagacttccgacactcctcagaggactttaggttccccccggaggacttcaggcactccccagaggacttcaggcgacctagggaggaagacttcaggcggccttctgaggaggacttcaggcgcccttgggaggaagatttcaggcgccctccggaggatgacttcaggcaccctagggaggaggactggaggaggccccttgaggaggactggaggcggccactggaggaggatttcaggcggtctcccacggaggacttcaggcagctccccgaggaggacttcaggcaaccccctgaggaggacttaaggtggctcccagaggaagatttcaggcggccacctgaggaggactggagacggcccccagaggaggactttaggcggcctcttcagggagaatggaggcgaccacccgaggatgacttcaggcggcccccagaggaggatttcaggcattcccctgaggaggacttcaggcagtcaccccaggagcatttccggaggccacctcaggagcatttccgtcggccacccccagagcatttccggagaccacctccagagcattttaggcggcctcccccagagcacttccggcggccacccccagagcacttcaggcggccacccccagagcatttcaggcgcccgcccccggagcacttccggagaccgccccaggagcatttcaggcggccgcctcaggagcatttcaggcgctcccgagaggaagatttcaggcacccaccagatgaagacttcaggggccctcctgatgaagactttaggcaccctcctgatgaggacttcaggagcccccaggaggaagattttagatgcccttctgatgaggacttcaggcagctcccagaggaagaccttagggaagctccggaggaggaccctagacttcctgacaattttagacctcctggtgaggattttaggagcccgcctgatgattttagaagtcaccgcccttttgtgaattttggtcgcccagaaggtggcaagtttgattttggaaagcataatatgggaagttttcctgaggggagatttatgcctgatccaaaaataaattgtggttcaggtagagtaactcctattaagataatgaatcttccatttaaagctaatgtgaatgaaattttagactttttccatggttacagaatcatacctgattcagtttcgatacagtataatgagcaaggcttacctacaggggaagccattgttgctatgataaactataatgaagctatggctgctattaaagatctaaatgataggccagttgggccccgaaaagttaagttaactttgctgtagagagagagcatttctaaattcagttatcttccttgcagtattgatggagtaaaatacatttgttttaaaaaagtgttttttttttaaattatctaatgaaatattttatttttgacctgtgaatagaacaaatgtaaatagtagaatgtgaatctggttttcttttgcttgcaaattgccattctttttttttttcaaatttaaaattacacatgctgtttttttctttgatggggagaaagaactcattccctgagttcattcatttttgttgatgtcatcggtaatcttcaagacttattgaagtagagttgtatttggggaagatacattttatattcacttttttttttctttctgtagtctacctcttttactcaaactgtataaggaaatagtgactgattgttcaggtttggcattttcattgctacctgcctgcagaattaatgccctcttccttgtctaagatattactgtgttaagtgtcctgttaattataaatagttcaaaatggacagactgtcaacttgaaatttacttatgtaaaaagcttaggtgattcttagggtttccatgttcataactttacaaagctttataaaaataaaattgcaacttaatagagctaattaacttgtatttgtataaaaagaaaaaagaattgcagctcgatattgtgaagtttttcaataacttcattaaaccatatttatgatgggagggaccagacattctatagtaataatgtatagtgctgtgtataattccatggtttcttcaacatcttatcaaccaagtaaaattaatacaagatacgcaaaagatagtaaaataagaatctaattataggtgcaaggggactcaggcttatgctggaagaatctgacaagtggtatagtttgtttttctaggaagaatttactgatgagtcacataacttgcatgtaatattaggttctcattttttagcttcgaaactgtgtccatgcaaagactctataactgttaagacttgtgtggttgaattttgacttctttgatattcagcatttagtgcatacattttgcaactagggaatttgattttctatacccacaataatatttatggctaacatttattaggcacttactatgtgctaggcactgtaagcactttacatgcataatctcggtattccctgtgagtacagggttaattatttacctctatttcacaaatgagataatgaagtgggatgaagtgcgaggttaagcaacttgcttgaagtcataggtagtaaatcgtggggccaattttaacccagacagaccactgactccagttcatgcttttgctgcctcacttttttaagtggtatttttaattaggaagaccatgctaaagatactttcaaggataaatgattattttctcacttcaattgttggtttaaaattagcataaataggtaaaaccagcatgctcaaacactgagctcaaacattaacattactaataaaaaaaaaaagagtgactttaaaagtttctttctatccagggtttctcttgggatactcatatggtatattactggcttatatttcaaaattattttattcaacatgattgactttggccttttataatttacataaaacataattttcctcagttctgtaatccagattttccccattgagtaaataatacaattaaatttacatatggtaatttagacatttaataggatattgcataggtagaatactttgtcagtacttagttactacctatatgtatttttgtgttacttttcagtgatttaaagaaatctaacagaaatctgcttaaatttgttttaaatagtgaatatcctgcttgctatggaatgaataaacaggtaaatttgatatgaaaaaaaaaaaaaaaa

SEQ ID NO: 7011 - DNA, 3638 bp, Homo Sapiens
  NM_203391
gggccggaggggcggggtgagaaggctgcgcgcgggtaaaggggccgcctcgagcgcggtccgagcgttcagcggacgcgcgcggcctcgatctctggactcgtcacctgcccctccccctcccgccgccgtcacccaggaaaccggccgcaatcgccggccgacctgaagctggtttcatggcagcctcaaagaaggcagttttggggccattggtgggggcggtggaccagggcaccagttcgacgcgctttttggttttcaattcaaaaacagctgaactacttagtcatcatcaagtagaaataaaacaagagttcccaagagaaggatgggtggaacaggaccctaaggaaattctacattctgtctatgagtgtatagagaaaacatgtgagaaacttggacagctcaatattgatatttccaacataaaagctattggtgtcagcaaccagagggaaaccactgtagtctgggacaagataactggagagcctctctacaatgctgtggtgtggcttgatctaagaacccagtctaccgttgagagtcttagtaaaagaattccaggaaataataactttgtcaagtccaagacaggccttccacttagcacttacttcagtgcagtgaaacttcgttggctccttgacaatgtgagaaaagttcaaaaggccgttgaagaaaaacgagctctttttgggactattgattcatggcttatttggagtttgacaggaggagtcaatggaggtgtccactgtacagatgtaacaaatgcaagtaggactatgcttttcaacattcattctttggaatgggataaacaactctgcgaattttttggaattccaatggaaattcttccaaatgtccggagttcttctgagatctatggcctaatgaaaatctctcatagcgtgaaagctggggccttggaaggtgtgccaatatctgggtgtttaggggaccagtctgctgcattggtgggacaaatgtgcttccagattggacaagccaaaaatacgtatggaacaggatgtttcttactatgtaatacaggccataagtgtgtattttctgatcatggccttctcaccacagtggcttacaaacttggcagagacaaaccagtatattatgctttggaaggttctgtagctatagctggtgctgttattcgctggctaagagacaatcttggaattataaagacctcagaagaaattgaaaaacttgctaaagaagtaggtacttcttatggctgctacttcgtcccagcattttcggggttatatgcaccttattgggagcccagcgcaagagggataatctgtggactcactcagttcaccaataaatgccatattgcttttgctgcattagaagctgtttgtttccaaactcgagagattttggatgccatgaatcgagactgtggaattccactcagtcatttgcaggtagatggaggaatgaccagcaacaaaattcttatgcagctacaagcagacattctgtatataccagtagtgaagccctcaatgcccgaaaccactgcactgggtgcggctatggcggcaggggctgcagaaggagtcggcgtatggagtctcgaacccgaggatttgtctgccgtcacgatggagcggtttgaacctcagattaatgcggaggaaagtgaaattcgttattctacatggaagaaagctgtgatgaagtcaatgggttgggttacaactcaatctccagaaagtggtattccataaaacctaccaactcatggattcccaagatgtgagctttttacataatgaaagaacccagcaattctgtctcttaatgcaatgacactattcatagactttgattttatttataagccacttgctgcatgaccctccaagtagacctgtggcttaaaataaagaaaatgcagcaaaaagaatgctatagaaatatttggtggttttttttttttttaaacatccacagttaaggttgggccagctacctttggggctgaccccctccattgccataacatcctgctccattccctctaagatgtaggaagaattcggatccttaccattggaatcttccatcgaacatactcaaacacttttggaccaggatttgagtctctgcatgacatatacttgattaaaaggttattactaacctgttaaaaatcagcagctctttgcttttaacagacaccctaaaagtcttcttttctacatagttgaagacagcaacatcttcactgaatgtttgaatagaaacctctactaaattattaaaatagacatttagtgttctcacagcttggatatttttctgaaaagttatttgccaaaactgaaatccttcagatgttttccatggtcccactaattataatgactttctgtctggatcttataggaaaagatactttcttttttcttccatctttcctttttatattttttactttgtatgtataacatacatgcctatatattttatacactgagggtagcccatttataaattaagagcacattatattcagaaggttctaacagggctggtcttaagtgaaccactgtgtatataaatatgttggaaaacagctgtatacatttttgggcaacggttatgcataatatttaccaggagaatttttttcttaacaagccaacatttaaaatttatgttttatgtcaataaaagaaaatatactttattgtgacttcaactatatttcttatcccttacatttttatttaattgtcttagcttaaaaaaagaagaaactgtggaatactacagtaaatattgttttcaaacacaagcaataattcaaatagttatttttcttttgaattaattttagacatattttggatcctattgaggggataagaggatgtcaaaaaagttaaatacctaagtagaaaaaaatatagaaataaagccaagaatctctttcagttcaaatgttatcaattgttaataagaaattgctatctgggatgacagaattacctctgcttagtatctcattataactgaaagaaggtttatcattacaaataccttccaatgaaaccaagaatttctcaaaatatttaatgtcacatattataagaagttacctaatcctgcttcttaacatcaatttttaaaaatatcttaaaattactttgttttgtagtaaacagtgaagaaaagattgcctcctaattatttttttcaatgagtgctgaatgggaaaacatttatatcttactataaaaggttctgttttgtttggaatcaatggtagctttattgactgttctgattgtgctgtttctaatttattgaatctgctaggttttattgatgcagccaccacttaagtgacataaatattatagaaaggtactgtgaaatgatcactttgtggcaggggtacttttaaacataaatgtttctacaaaagtaggttgagttcattgtaaataattgtgaaagccactgttcaaataattttaagattacattaatttttctataaattggaagatttataaatgtttgaaattgtacacattgatatttaatgacaaatttacttaaaataaattgaccccttgttctta

SEQ ID NO: 7012 - DNA, 4300 bp, Homo Sapiens
  NM_203406
caacccgcgaggccccacactttctgcgccagctgggagtgcgcgccctgcagagccagtgggtgggcggttctagctcttcccaccctcactgcgggcctctgctgtcacacgcccggggtggcgaaacggtcgccacctgagtctccattctgctgcagtggcccctgcgttaaagctctctcgtggtgcggctgccgaggctgcggtagctcctgcgcccccgtgctggtggcgcagcctctgcttgctgccgacctggcggaagggtgcgggagcgcacgctacgggcagcgtcggtctgcgtccttcctcctcctattccgacccccgcatcccacgcccccgcctcgctctacgcctcctccctggctgcaggcagaccgcttcacacagccgcagtgccctgtgtgtggacagcctgtgggagactcgcacgcccacactcaccccgcctggctgcacccctgcccagcatgtcggcgctcgagtggtacgcccacaagtctctaggcgatggtatcttctggattcaagaacgtttctacgagtcgggcaaccgtgccaacatctggctggtgcgcggctccgagcaggacgtggtgatcgatacaggcctggggctgcgcagcctcccggagtacctgtactcctccggcctcttgcaggaccgagaggccaaagaggacgcggcgcgccggccactgcttgccgtggccacccacgtgcacttcgaccactccggcggcctctaccagttcgaccgcgtggcagtgcaccacgccgaggccgaggcgctggctcgcggggacaactttgagaccgtgacctggctttccgatagcgaggtggtgcgggcgcccagccccggctggagggccagacagttccgggtacaggcggtgcagcccaccctcatcctgcaggatggggatgtgatcaaccttggtgacagacagctcactgttatgcacatgccaggtcactccaggggcagtatttgcttacatgacaaagaccgaaagattctcttcagtggagacgtcgtgtatgatggatcactgattgactggctcccatacagcaggataagtgactatgttggaacttgtgaacgtctaatagaattagtggacagaggtctggtagagaaggtgcttcctgggcacttcaatacctttggtgctgaaaggctttttcgattggcttctaactatatttcaaaagctgggatatgtcacaaagtttctacttttgccatgcgatctcttgcaagtttagctctacgtgtaacaaattctaggacctcgccctagtatctatactgataatatattttgattaattatatacattaattcattctgtgctatttaactgattaatagtgagcatttcatgaagtgcttttataccactattatatatcagagaaagattgagaatgaataagccaaaaagaaaattgttagtttaaattgttttctttcttccaagaaagaagccacttaaataagcttatactttgccaaagctgtcatcttgtaatatatgctctagaaatgacataaaggtttatggggaagcaaagagagattttgtggcaagagaactgcccttgcctctgtttttcttgttttattcccttgatgacctagggaaaaaaaggcatgtagagtattatgtttatactttaaacttgatatttttagtgtattatttaaagataaaggttcttgggtttaaaatacattagaacttaatgcagacatataaagtaacattgagaatgacaactaaaacattccattgttatggtcctgaattttttatgcttcatttcatgtatttattctttgtataattatagcatacatgttatgtaatataacttatgaaaagtacagtgaattttgctttattgcaaagctttaaatataaatttcagagtgcttcagtaaaaagctactatatattgttgtttgttattgtgtaggtaatattttcaattatgaaagtgaaatgcaaatgtctgttatctaactacaaattgtcagatttcttaaaaggacactgtcaggcaaatttgaaaatatacacattgagaataattttttattattatatcctattttaatattaacagctattatgaacaaaatttttcctgttaaatagcgacttcagtattgtgttatgttttacagcgttaaaacaactatgaagatctgcagctattcttttacttaacatgcatatgtactacagagggatttttaaattaattgcaaaatgtgcattagctattgacttagagtgaattgccttttgtatcctgattcacaacacctattcctgttcagtattctttgtcttgaatagagaagtctatgttcgtaaagtcatataaaaggttataccactatttagtaaaaagttttagtttggtgctgttaataataatttgctaaaaggccttttagaatatttcataaagggttttaaacagttttttcccactgcctttttattattgacatatctaaaaccaaactgaaatcgctttggaaatcagattttttaatgttaggaagatccagcaattttggtttctgaaaaattacaaaacttttctaccctacagatgcccaggttctttagttttttattcattcaactcacacacacataaacatatacatacacaaacacaatcccacatgcaaacacacacagccacatatatacatgtgtagcacagcgctaaacactgtggaggctaaaaaaagtcaaagacaacattataactaaaagtcgaaagcacacaaaatataaataatagtgtatgcaagttaatgtacattatacatgcgtgtaagggacataaatggaggggtgtgaactttggttaggcaaagtttactggaggaggggtttttgagtcaaatttggaaggatgaacttgttagatagtcagagttggaaacaaaacaatccaagaatagggatataagcattgctagtctagaatagtctattccttgtgaaaatataaatttaattttcaggaatccagtatattccaaacatcacatatttagcatgagaaaaattgatttgtgattgtgtatatgagtcattgttaatgggagacaagctgaactgccacatgccaccaaatgaacctttacttcaatcaaaaaggagggtatgattggttcaattatattaacagaatatcatgggcatttctctatgatggtcattcaaggtagtaggtctctttcaactgagtgcaacattgagaataatgatttggttcagggcaactacaaataatcacttactaagccttaaataaagccattatttttatatcaatagcacaaaggaaaaccaaaagtccttaaccactgaccatttttatcatattttaggcctttttttaaaaaatcagggtatagtaggcactaagttttattaggaaatatttaaacctgctgaaggatttatttataaaaagtgcaatttttcaaaacacattattattttttaatttcccaattttttcagtttttcaaattgtaccacaacatagaactgtgatattttgctattacttcaatgtgaataaataaggtaaagtatatcatttattgagtgcccatgctgtacatttaaaatatgcattatttaatttaatcttactcccagcaccaaaaggtaattgaccagcctcaacacaattttggacaaagctagtaactgaacacaggtctgtctgccccacacttctctttctcttgtaactgcacaatagcagaaaattggcaagatgtatttttactttccaagatgccgtgtgtgccaagaataaatgaaatgatgttaaagcataataataacatatctttaaaaagcttttcaaaatatattttcaccctgacagtgacccttgtaacttaaatgatttttggaaatattagtatgtaagtataattcaaagttgtcaaaatgtaagacatttagaagtaatttttattatttatattgttaatacttaatcactggaaattcattttccttactcgatgttttctttcaactgagaagcctaaaacaaacaaaaaccttgtgtgttatcctgatatagttgactaaatgtatttgttcttatatggatagtaatatgaatgtgacatgcaccaattgtcctattataattttcagataagtgtaactaagcacttgtgtaataaatattagtcattttatttcaaaaaaaaaaaaaaaaaaaaaa

SEQ ID NO: 7013 - DNA, 887 bp, Homo Sapiens
  NM_203411
aggcgggccatggcggatgtccccggggcacagcgagcggttcctggtgacggcccagagccccgggaccccctggactgttgggcctgcgctgttcttgtaacagcccagaatctgctggtggctgccttcaatcttctcctgctggtgctggtgctagggaccatcttgctacccgctgtcaccatgctgggcttcggcttcctctgccactctcagttcctgcgctcccaggcacccccttgcaccgcgcacctgcgggaccccggtttcacggccctactggtcaccggattcctgctcctcgtgccgctgctcgtgcttgctctggccagctaccgccgcctctgcctgcgcctccgcctagccgattgcctcgtgccctacagccgagccctttatcggcgtcggcgcgccccgcagccgcggcaaatccgggcctcaccagggtcccaggccgttcccacatcaggaaaggtctgggtctaatgaccctcgagtcaagaacaaccctgacggctgccctccctcttattcggcccaaggacttgaagcccggcatcttccgacctgccctgcccccacccctgcctgagcggagtcctagcatccccttgggagcagcagcgtcagtggacccagtgctgagaaaagcccccacatcccggaaaacccactttcctttcacgacccacatctcaatcctgaacatctaggctggaacctgcacacctccccctcagctccgtcgtgaatgggacaacaatctcgtgccctcgttttatggtgcagcttctctagtatttctggggctggggggcggggctggaggggaaggagtgtccacgcatcaataaagatttaacgaactgaaaaaaaaaaaaaaa

SEQ ID NO: 7014 - DNA, 2184 bp, Homo Sapiens
  NM_203413
ggccctcgcggggggcttgtgggtcctcctccccctcccactgacaactgccccaactgctcttcccgccccggtcacagtgaaaatgtagacggggtcgttgtccactatgttaggtcttaatggtgggaggacgcccgagtgctcggcccgtttcaccccgaggaggaaggacactgggtcatgacgccatcagagggcgccagagcagggaccggacgcgagttggagatgttggactcgctgttggccttgggcggcctggtgctgcttcgggattccgtggagtgggaggggcgcagtctcttgaaggcgcttgtcaagaaatctgcactgtgtggggagcaagtgcatatcctgggctgtgaagtgagcgaggaagagtttcgtgaaggttttgactctgatatcaacaatcggctggtttaccatgacttcttcagagaccctctcaactggtcaaaaactgaggaggcctttcctggggggccgctgggagccttgagagccatgtgcaagaggacagatcctgttcctgtcaccattgctctcgattcactcagctggctgctacttcgccttccctgcaccacactctgccaggtcctgcatgctgtgagccatcaggactcttgtcctggtgacagctcctcagtggggaaagtgagtgtgctgggcttgctacatgaagagcttcatggaccaggccctgtgggagctctcagcagccttgctcagactgaggtgaccctgggcggtaccatgggccaggcctcggcccacatcctgtgtcggaggccccgacagcgcccaactgaccagactcagtggttctccatccttccggacttcagcctggatctccaagaggggccctctgtagagtcccagccctactccgatcctcatatacccccggtatctaagaatgccaaggccagaacaaggaaatgtagtttagtatctggtcacgggagagaaaataaaagctgcagaggttgggggtggggtcagggattctagggatggggcagagtggcagcatcctttgtacctacaggtggatcccacaactcatttgacctttaaccttcacctgtccaagaaagagagagaagccagagatagcctgatcctgcccttccagttcagttctgaaaagtaaggttgggacctgggtacgtggatccctgagtagatcccagcatctgggccatggagaggttggggcaacaggttattgattaacctgactttatagggactgaagtccacctccagagacaagtccaagttcttgatccacccattccccctataatggcagaggacctttatgtctcttttctctcccttatacccttggatcacagctccagttgtccccagagcaccctgggcctgggctgagccagaccagacccttgggaggtggccctatccctaggcagtggtgctaggaggacagaaggctatatgggcgtggcagaggctggttaacaagggcttagtacacgcttgctgttctgtgcccagtatgtgggcggatgacgcaagactacaagatccttgccctcaagctgctaggaacttacggttttattaggagagcagtacaagggtatctatcccagtaccaaatggtgcttcagctctaacatggaggtcagagaaagggacttggaccaataaaatgacatggaggcctaacaggttgcctgaatgagagtcacagtcacctggaagaaagtatccagacccaacctgttagctaccctcaccagcaccaaatcttcccttctcagacagcaggctctcctgcggcctaggccagggcaggctaccagccacatcttctatgagccagatgcttatgatgacctggaccaagaagacccagatgacgacctggatatttgactggccagatttgattagattgtaattggagggggcgcgggaagactttgggcccagaaccatctttctattgtttgtgttagccttaccctgtccctgccccaccttggttccccttgtctatggagccccgccttgtgagccaggaagcagcgtctcatcaggacagaaggtaggatgaagacatggggtaatgtgagagagtagaacacccccgtacctaataaaaatctttatttttttattaaaaaagaaaaaaaaaaa

SEQ ID NO: 7015 - DNA, 4148 bp, Homo Sapiens
  NM_203416
atatgtagccttttcattttcatgaaagtgaagtgatttttagaattcttagttgttttctttagaagaacatttctagggaataatacaagaagatttaggaatcattgaagttataaatctttggaatgagcaaactcagaatggtgctacttgaagactctggatctgctgacttcagaagacattttgtcaacttgagtcccttcaccattactgtggtcttacttctcagtgcctgttttgtcaccagttctcttggaggaacagacaaggagctgaggctagtggatggtgaaaacaagtgtagcgggagagtggaagtgaaagtccaggaggagtggggaacggtgtgtaataatggctggagcatggaagcggtctctgtgatttgtaaccagctgggatgtccaactgctatcaaagcccctggatgggctaattccagtgcaggttctggacgcatttggatggatcatgtttcttgtcgtgggaatgagtcagctctttgggattgcaaacatgatggatggggaaagcatagtaactgtactcaccaacaagatgctggagtgacctgctcagatggatccaatttggaaatgaggctgacgcgtggagggaatatgtgttctggaagaatagagatcaaattccaaggacggtggggaacagtgtgtgatgataacttcaacatagatcatgcatctgtcatttgtagacaacttgaatgtggaagtgctgtcagtttctctggttcatctaattttggagaaggctctggaccaatctggtttgatgatcttatatgcaacggaaatgagtcagctctctggaactgcaaacatcaaggatggggaaagcataactgtgatcatgctgaggatgctggagtgatttgctcaaagggagcagatctgagcctgagactggtagatggagtcactgaatgttcaggaagattagaagtgagattccaaggagaatgggggacaatatgtgatgacggctgggacagttacgatgctgctgtggcatgcaagcaactgggatgtccaactgccgtcacagccattggtcgagttaacgccagtaagggatttggacacatctggcttgacagcgtttcttgccagggacatgaacctgctgtctggcaatgtaaacaccatgaatggggaaagcattattgcaatcacaatgaagatgctggcgtgacatgttctgatggatcagatctggagctaagacttagaggtggaggcagccgctgtgctgggacagttgaggtggagattcagagactgttagggaaggtgtgtgacagaggctggggactgaaagaagctgatgtggtttgcaggcagctgggatgtggatctgcactcaaaacatcttatcaagtgtactccaaaatccaggcaacaaacacatggctgtttctaagtagctgtaacggaaatgaaacttctctttgggactgcaagaactggcaatggggtggacttacctgtgatcactatgaagaagccaaaattacctgctcagcccacagggaacccagactggttggaggggacattccctgttctggacgtgttgaagtgaagcatggtgacacgtggggctccatctgtgattcggacttctctctggaagctgccagcgttctatgcagggaattacagtgtggcacagttgtctctatcctggggggagctcactttggagagggaaatggacagatctgggctgaagaattccagtgtgagggacatgagtcccatctttcactctgcccagtagcaccccgcccagaaggaacttgtagccacagcagggatgttggagtagtctgctcaagatacacagaaattcgcttggtgaatggcaagaccccgtgtgagggcagagtggagctcaaaacgcttggtgcctggggatccctctgtaactctcactgggacatagaagatgcccatgttctttgccagcagcttaaatgtggagttgccctttctaccccaggaggagcacgttttggaaaaggaaatggtcagatctggaggcatatgtttcactgcactgggactgagcagcacatgggagattgtcctgtaactgctctaggtgcttcattatgtccttcagagcaagtggcctctgtaatctgctcaggaaaccagtcccaaacactgtcctcgtgcaattcatcgtctttgggcccaacaaggcctaccattccagaagaaagtgctgtggcctgcatagagagtggtcaacttcgcctggtaaatggaggaggtcgctgtgctgggagagtagagatctatcatgagggctcctggggcaccatctgtgatgacagctgggacctgagtgatgcccacgtggtttgcagacagctgggctgtggagaggccattaatgccactggttctgctcattttggggaaggaacagggcccatctggctggatgagatgaaatgcaatggaaaagaatcccgcatttggcagtgccattcacacggctgggggcagcaaaattgcaggcacaaggaggatgcgggagttatctgctcagaattcatgtctctgagactgaccagtgaagccagcagagaggcctgtgcagggcgtctggaagttttttacaatggagcttggggcactgttggcaagagtagcatgtctgaaaccactgtgggtgtggtgtgcaggcagctgggctgtgcagacaaagggaaaatcaaccctgcatctttagacaaggccatgtccattcccatgtgggtggacaatgttcagtgtccaaaaggacctgacacgctgtggcagtgcccatcatctccatgggagaagagactggccagcccctcggaggagacctggatcacatgtgacaacaagataagacttcaggaaggacccacttcctgttctggacgtgtggagatctggcatggaggttcctgggggacagtgtgtgatgactcttgggacttggacgatgctcaggtggtgtgtcaacaacttggctgtggtccagctttgaaagcattcaaagaagcagagtttggtcaggggactggaccgatatggctcaatgaagtgaagtgcaaagggaatgagtcttccttgtgggattgtcctgccagacgctggggccatagtgagtgtgggcacaaggaagacgctgcagtgaattgcacagatatttcagtgcagaaaaccccacaaaaagccacaacaggtcgctcatcccgtcagtcatcctttattgcagtcgggatccttggggttgttctgttggccattttcgtcgcattattcttcttgactaaaaagcgaagacagagacagcggcttgcagtttcctcaagaggagagaacttagtccaccaaattcaataccgggagatgaattcttgcctgaatgcagatgatctggacctaatgaattcctcaggaggccattctgagccacactgaaaaggaaaatgggaatttataacccagtgagttcagcctttaagataccttgatgaagacctggactattgaatggagcagaaattcacctctctcactgactattacagttgcatttttatggagttcttcttctcctaggattcctaagactgctgctgaatttataaaaattaagtttgtgaatgtgactacttagtggtgtatatgagactttcaagggaattaaataaataaataagaatgttattgatttgagtttgctttaattacttgtccttaattctattaatttctaaatgggcttcctaattttttgtagagtttcctagatgtattataatgtgttttatttgacagtgtttcaatttgcatatacagtactgtatattttttcttatttggtttgaataattttcctattaccaaataaaaataaatttatttttactttagtttttctaagacaggaaaagttaatgatattgaagggtctgtaaataatatatggctaactttataaggcatgactcacaacgattctttaactgctttttgttactgtaattctgttcactagaataaaatgcagagccacacctggtgagggcacaaaaaaaaaaaaaaaaaaaaaaaaaaaaaaaaaaaaaaaaa

SEQ ID NO: 7016 - DNA, 1083 bp, Homo Sapiens
  NM_203433
ctgtgcgcggagggcgtggcctgtgcggggcgggacttattgcccgcgcggtgagggagcgtggtctcgcgcaagccggcgtgcggtcccgcggcgctgcagttgtgtccagccggtcacggggcggctatggcggccacgttcttcggagaggtggtgaaggcgccgtgccgagctgggactgaggacgaagaggaggaggaggaggggcggagggagacgcccgaggacagggaggtgcgtctgcagctggcgcggaagagggaagtgcggctccttcgaagacaaacaaaaacatctttggaagtttctttgctagaaaaatatccgtgctccaagtttataattgctataggaaataatgcagtagcatttctgtcatcatttgttatgaattcaggagtctgggaggaagttggttgtgctaaactctggaatgaatggtgtagaacaacagacactacacatctgtcctccacagaggctttttgtgtgttttatcatctaaaatccaatccctcggtttttggctcttgtccaaggaagaacatgcagataactattctcacatgtcgacatgttaccgattataaaacctcagaatccaccggcagccttccttctcctttcctgagagccctaaaaacacagaatttcaaagactcggcgtgttgtccattgctagaacaaccgaatatagtacacgaccttcctgcagcagttctaagctactgtcaagtatggaaaatcccagcaattctgtacttgtgttatactgatgtgatgaaattagacctaatcacagtggaagcttttaagcctatactttctaccagaagcttgaagggtttggttaagaatattccccaaagcactgagatactaaagaaattgatgacaacaaatgagattcagagtaacatttatacatgatcttaaacattgttttgtagtgtatattacttgtccattcctttaaggggagcagcctgcactcttttgtagattacttttgggggatatattttgagaatgatgaaacggaataaaattgtaaaaaactaaaaaaaaaaaaaaaaaaaa

SEQ ID NO: 7017 - DNA, 2724 bp, Homo Sapiens
  NM_203434
actcattgctttggcgccgtctggggagcgcgagcccgcgggtggcgcgcggcgcatggtggcggctcctttcggagcgcagccgaacctctgacccggactccgttacccctgcccggcgcgccccggcggccggctggaggcagaaacagcagaagcgttaacagcagcagcggcggcggctgctccgccgccgtctccgcgggagcatggagtgcgccctggacgcccagagcctgatcagcatctccctgcgcaagatccacagctcccgaacccagcgcggcggcatcaagctgcacaagaacctcctggtgtcctacgtgctccgcaacgcgcgccagctctacctgagcgagcgctacgccgagctctaccggcgccagcagcagcagcaacagcagcagccgccccaccaccagcaccagcacctagcgtacgcggcgccgggcatgccggccagcgcggccgacttcggcccgctccaacttggcggcggcggggacgcggaggcgcgcgagccggccgcccggcaccagctgcaccagctccaccagctccaccagctgcacctccagcagcagctgcaccagcaccagcacccggcgcccaggggctgcgcggcggcggcggcggccggagcgcccgcgggcggcgcgggggcgctctcggagctgcccgggtgcgccgcgctccagccgccgcacggcgcgccccaccgcgggcagcccttggagcctctgcagccgggtcctgcgccgctgccgctgccgctgccgccgcccgcgcccgctgcgctctgcccgcgggaccctcgcgccccggccgcctgctccgcgcccccaggggccgcccctccggccgccgccgcttctccgcccgcctccccggcccccgcctcctcccccggcttctaccggggcgcataccctaccccttcggacttcggcttgcactgcagcagccagaccaccgtgctggacctagacactcacgtggtgaccacggtggagaacggctacttgcaccaggactgctgcgcctccgcccactgcccctgctgtggccagggcgctccgggaccgggcctggcgtccgccgccggctgcaagcgcaagtattaccctggccaggaggaggaggaagacgacgaggaggatgcgggcgggctgggggccgagccccccgggggcgccccgttcgccccctgcaagcgcgcccgcttcgaggacttctgcccggactcgtccccggacgcgtccaacatctcaaacttgatctccatctttggctccggcttctcggggctggtgagccgacagccggactcctcggagcagccgccgccgctcaacgggcagctgtgcgccaagcaggcgctcgccagcctcggcgcctggactcgagccattgtcgccttctagggacccccgagggcacagggacccggggccccgcggggctggggccagacaaagactcggcaaaggggcgagaggagggaacgagcgggcgccgggccactcggggctgagctgggggcgagcgggggcaggcggctgatgttttataaattgtaaaataaaaaaaaaagaaatctaaaatcttggactttatttttgcagagagaaaaagcgcctatttaagtatgctttgtgtttctcctactcctttttttctttttattgtagtgattgcagtggtgtttagcgaggagcctaccacgtgagggagggctgctgcccggaggaggtgccgggcagccgggggcgaggcagggcgccctggccgccggggcgcgccgggggcgcagctcaggagggcgccggacctgggaagccgattccaatcagttgtcagacccgggaagcccgacgttccgctctcccgagtccctctgtggggtgaggaatgggtcttgtgaaattctgagcaaaaacaaaggcaaactctatctccgaaagggacgtttgggtcacatttcctctctgggggcggactccaaagttctcaaaatgagaaggcagaaatgaaaacacttcaactttttttttcttttcttcccggggcgggtgtcttgaacccctcttctccccgcccctctggctccgttctcctcccctcctccacccgtctcccggactcgggggtggcgcctgacaccccgacactctcggacactgggtaaggggtggggggcgggcacggcggactacatttcccatcatgcctagcactgcggtcctcactaaacaaaaaaggaagtcaattccttcacctggatccccggcggccccgggggagggaggggccgggaccgccgactgcgttggagactttgcactaagttcctggtcagctgtggtgtttgtgtgtgtgcttctaagttgcactgccttggttcagccttcggttgcatttcatgaaaccagcattgttcgagcctgtgagaaccccgtcctgtgtcttcagctcgatagatttgtttaatttaaaagccttttgttgtaaaaaggtggggttcgtctgcagcccctctggttctctgccatcagcaccgtgtggactccaaaacgagttgccaatccttcctttctcggcccttttccctcattaccctgtatttttgtgcatactgaattgtatatcaccgggtaaaactgttcagattgtttaaatttataatcttaataaaaagtcgattacagaaaaaaaaaaaaaaaa

SEQ ID NO: 7018 - DNA, 3023 bp, Homo Sapiens
  NM_203453
cggaagcggaagaggctgcagggccgggaagcctctgtttggtccggccaggtcccgggatccgggccgccagctgcgatgccaagtccccggaggagcatggagggacggccgctgggcgtctccgcttcgagcagcagcagcagccccggcagcccagcccatggcggcggtggcggcggcagcaggtttgagttccagtccctgctcagcagccgcgccacggccgtggaccccacctgcgcccggctccgtgcatcggagagcccagttcaccgccgcggctccttccccctggccgcggcgggcccctcgcagtcgcccgcgcctccgctgcccgaggaggaccgcatggacttgaacccgtccttcctgggcatcgccctgcgctccctgctggccatcgacctgtggctgtccaagaagctgggggtgtgcgcgggagagagctcgtcgtggggcagcgtgcgaccccttatgaagctgctggagatctcgggacacggcatcccctggctgctgggcaccctctactgcctgtgcaggagcgacagctgggccgggcgcgaggtgctgatgaacctgctcttcgccctgctgttggacctgctgctggtggccttgatcaaagggctggtccgcaggcgccgcccggcccacaaccagatggacatgtttgtcactctctcggtggacaagtactccttcccctcgggccatgccacaagggccgccctgatgtcgaggttcatcctgaaccacctggtgctggccattccactgagggtgctggtggttctgtgggccttcgtcttgggcctatccagggtcatgctggggcggcacaatgtcaccgacgtagcttttggcttttttctgggctacatgcagtacagcatcgtggactattgctggctctcaccccataatgctccggtcctctttttactgtggagtcaacgatgacaccatctcattgattatggcaccaggaagtctgaaggtttccacattcgatgatgtcaacctaaaccagcagccatcccgcttgtccctcttaggcatttcaggcttcctttgggatttcaggtgtcccatgatcttgatgtgctgctaggctggagcacacactggccattactgaacacagccatattagggaaagcaaaaaaacccaaaaaatcctctattgtatatttattcaacaactgtttatgtttccaggacaactgcaaagaaaacaagctgaggtggttatactgttgctgttaaaagttggtatcagtaagatttgtgttttgtgataatccctaaatcaacataccacttgtaaactgaacttcgagaaagaaacatgatgttcattctgtaaatatacatgcagacaggtcatgtactaatcctagtccttttcctgaggtagattttaaacagtatttttaaagtccaagacataggtttttctagtttattccctgaagatctgttgccacagttgggagatttcttcttaatcctgattttcttggtaagcttttttactttattatctctataatttattatctctatccatatttgtggatcgggtagtgggaaaagagattataatacttgtctttctctcctctccctccatccctcaaaagatctttatgcatttcccactactcccttactgtcttttagcattcagagaaaaagccaacttgcttaaagaggaatcacttaaaaggtaggcatatctaagatgctcatagaagaggaagaatgggacatggccccatgcttatttttgtttacaacgtaacatggcatgagagagggcagagaaactaagttgctggggaaagttagaggaactgaaagtttgggaataggctgaccacatattatgccagtgaccagtatgacaggagatggggccctgctgccagtcatctccactgaataaagaataatgctcctctttcagggtaataaagtggggaaaaggaacgtcttctcaatgcaagaacataagctttctcgtatatacctgtatgctacagtttttcacatggaattccgttttctgaggtacagcacattttaggtaacagtatttaacttgaaattcatcatgggagtctgctgctataccaggcacaagataaaactccaaaatttctgtttacattgacctttacatttaaagctgttcatccatggtgcctccccaaatcataagaccaaagaccaccaaacgcagggtggactctgctcattattctttgacccagaaagactggagaaggtatgtgctttaagtgctgctctacctgaaaagaaatcctttaaattacctatggaagtgatgtcctcagataatcttaatgactattttggcatttataaatagaaatgattatggactttgatctgccatacggaggttcggaacctggagaacggctgtgataagtaggttttgattgagtgaaagcatgagcttgttcagagtgaggggcatagtgaaaaaggaacagccatgcctcaaaatcaaatcatttgcattcccacagcatcctgaataccgactacctcttcacttgctaaagcagctaaactgtgaagctctaagtggtttgggtttgttgtttaaccttagcgagatcctttaactgcagcaatattcaagccagatatttggaagcaaatgatatttcctcttgcagtgtccacaaatctgaatattaggggcatgaaattaggcttaccatctgatttgtaattacaattttggaattctctgttttagttgctgaggcctgagttttctggctcttaaagcatagatcatttcacctgatgtttttgaagcatcctaagtacagtagagtagaaaactgatttctttgttaattgtacactgaataatgccttttaaaaatcaaaataaaattaacaaataatggtgaaaaaaaaaaaaaaaaaaaaaaaaaaaaaaaaaaaaaaaaaaaaaaaacaaaaaaaaaaaaaaa

SEQ ID NO: 7019 - DNA, 1136 bp, Homo Sapiens
  NM_203456
agtggggaagaggacgggtcgagtgctggcttccggcggaaaagcgcgcgagcaagatggccaccaccaagcgcgtcttgtacgtgggtggactggcagaggaagtggacgacaaagttcttcatgctgcgttcattccttttggagacatcacagatattcagattcctctggattatgaaacagaaaagcaccgaggatttgcttttgttgaatttgagttggcagaggatgctgcagcagctatcgacaacatgaatgaatctgagctttttggacgtacaattcgtgtcaatttggccaaaccaatgagaattaaggaaggctcttccaggccagtttggtcagatgatgactggttgaagaagttttctgggaagacgcttgaagagaataaagaggaagaagggtcagagcctcccaaagcagagacccaggagggagagcccattgctaaaaaggcccgctcaaatcctcaggtgtacatggacatcaagattgggaacaagccggctggccgcatccagatgctcctgcgttctgatgtcgtgcccatgacagcagagaatttccgctgcctgtgcactcatgaaaagggctttggctttaagggaagcagcttccaccgcatcatcccccagttcatgtgccagggcggtgatttcacaaaccacaatggcactgggggcaagtccatctatgggaagaagttcgatgatgaaaactttatcctcaagcatacgggaccaggtctactatccatggccaactctggcccaaacaccaatggctctcagttcttcctgacatgtgacaagacagactggctggatggcaagcatgtggtgtttggagaggtcaccgaaggcctagatgtcttgcggcaaattgagaaacaagaagagtcagcaattaccagccagccgaggtcctggaagctgacgtagagctcgtgccgacggcagacctgccggccgtgggagccgtggacgtcatctgcagggacagaaggggcaaggtcttttctggggttcctactgtgtgcagctactatggggtaccagggtgggggatgccctgatgagcacatttgtcaaataaatgaatgacaggaaaccaaaaaaaaaaaaaaaaaa

SEQ ID NO: 7020 - DNA, 1299 bp, Homo Sapiens
  NM_203457
acgggtcgagtgctggcttccggcggaaaagcgcgcgagcaagatggccaccaccaagcgcgtcttgtggactggcagaggaagtggacgacaaagttcttcatgctgcgttcattccttttggagacatcacagatattcagattcctctggattatgaaacagaaaagcaccgaggatttgcttttgttgaatttgagttggcagaggatgctgcagcagctatcgacaacatgaatgaatctgagctttttggacgtacaattcgtgtcaatttggccaaaccaatgagaattaaggaaggctcttccaggccagtttggtcagatgatgactggttgaagaagttttctgggaagacgcttgaagagaataaagaggaagaagggtcagagcctcccaaagcagagacccaggagggagagcccattgctaaaaaggcccgctcaaatcctcaggtgtacatggacatcaagattgggaacaagccggctggccgcatccagatgctcctgcgttctgatgtcgtgcccatgacagcagagaatttccgctgcctgtgcactcatgaaaagggctttggctttaagggaagcagcttccaccgcatcatcccccagttcatgtgccagggcggtgatttcacaaaccacaatggcactgggggcaagtccatctatgggaagaagttcgatgatgaaaactttatcctcaagcatacgggaccaggtctactatccatggccaactctggcccaaacaccaatggctctcagttcttcctgacatgtgacaagacagactggctggatggcaagcatgtggtgtttggagaggtcaccgaaggcctagatgtcttgcggcaaattgaggcccagggcagcaaggacgggaagccaaagcagaaggtgatcatcgccgactgtggggagtacgtgtgaggcggcactctctctgcttccccctccgctcttgaccctgcatatccaggaaggaactgccagcctcagaggaggcagcaccgagggtgcctgtttgaagcaagcagcatttgggatatgtgcccttcctcagggtctgcttggagcagctcctctgcaggcacagcctggactattcccaggcacagctgtgggcccaggagccagctcaggtgctcccctccaccatgggcaggctgtgcaaaaagccactggcttttctcagcatttgctgctgggcctctcctgggactaccagtgtggctcttacgtgttttctttgctaaaataaaccctagttcttatattgctaaaaaaa

SEQ ID NO: 7021 - DNA, 1604 bp, Homo Sapiens
  NM_203462
gagttgacggctgcgactccattttgtaggccgcttatttgtgtgcatccacggcgattcttcccgcagagttgtgaagcgaaaggcttacaattaaaaggaagaaaaaaaaataaagataattcgggagtacaattgacaaagcgtgtgggtcgctcagcctccagcagtaactgctgatctccagttcttggagggttccggtgagaagaacgcccctactgcggtactgaggaagcggcaggaggagatgcggcccctggacatagacgaggtggaagcgcctgaggaagtggaggtgctggagcccgaggaggatttcgagcagttcctgctcccggtcatcaacgagatgcgcgaggacatcgcgtctcttatacgcgagcacgggcgggcgtacctgcggaccaggagcaagctgtgggagatggacaatatgcttatccagatcaaaacgcaggtggaggcctcggaggagagcgccctcaatcacgtgcagcacccgagtggcgaagccgacgagagagtgtcggagttgtgcgagaaggctgaggagaaagccaaggagattgcgaagatggcagagatgctggtcgagctcgtctggcgaatagagagaagcgagtcttcttgaaggaggagatcggtggttcacagctgaggactgtagtcaactggtaaggatgaactgacaccttgaggaaactgaaacagcttgtcattttctctgttttgtttttgtatgttttttaccccgatgtaacagtctcccttatggtcagtgattgatgacctcgatatggatttagattatcaaatgtgtttggttttggaaatataacttttgtcaaagaaatactctcagaagagaaatggggcttaattaagttgtttttgtggtcacgtttattcttgttacttcgctgtgtttttgaaatgttgggcatggcctcgtattttgctgttacctttgtgacctgattgttttttggaacacgtcaagacgtgggatcagaatcttccaactttagaggtgcaatggaagacactacgctacttggttgagcctggtgaagaatgtattaatgagactgctttgcataaaactgggaagaaagagaagacagttggagatggaagatggttttgtatatattttggaactttagttcctctgtgagacgaaagaggagagctatgttttgtggcacattgtctgatatatattgtgtaacctgtcaggtgagttgatttagacaacatagctgaccttttatgacaaggcagtttgaatagggactattgtaataccctcacacattataggggcatcagagaatggcatggaagagacagtctacagagagctttaagaggccggagaaaggaaaagacattatcagggcctggaaagtctcttccagttcatcagggtagtagacctgtcagattggaggtcaaagtcaaaagtataataagtgttaatttgccttgaaaaacaaagacctaaaaagccttttttaagaaataaattttttgttcacatgaccaaagcccctcctgtgtgtgttaataaaagaatcataaacaaaaaaaaaaaaaaa

SEQ ID NO: 7022 - DNA, 6259 bp, Homo Sapiens
  NM_203463
gggcgggagcagcggcggcggcggcacaggctcggggccagccgggcgcgcatccccgggcgccctgcgcggtggagagcttggcgggctgcgggtgccgcaggacaggagtggacaaagcaagatggcagggatcttagcctggttctggaacgagaggttttggctcccgcacaatgtcacctgggcggacctgaagaacacggaggaggccaccttcccgcaggctgaggacctctatctcgcttttcccctggccttctgtatcttcatggtgcggctcatcttcgagagatttgtagccaaaccgtgcgccatagccctcaacattcaggccaatggaccacaaattgctccgcccaatgccattctggaaaaggtcttcactgcaattacaaagcatcctgatgaaaagagattggaaggcctctccaagcaactggactgggatgttcgaagcattcagcgctggtttcgacaaagacgcaatcaggagaagccaagcacgctgacgaggttctgtgagagcatgtggagattttcattttacctttatgtatttacctacggagtcagattcctgaaaaagaccccctggttgtggaatacgaggcattgctggtacaactacccctatcagccactcacaactgaccttcactactattacatcctggagctgtcgttttattggtctttgatgttttctcagttcactgatatcaaaagaaaggactttggcattatgttcctgcaccaccttgtatctattttcttgattaccttttcatatgtcaacaatatggcccgagtaggaacgctggtcctttgtcttcatgattcagctgatgctcttctggaggctgccaaaatggcaaattatgccaagtttcagaaaatgtgtgatctcctgtttgttatgtttgccgtggtttttatcaccacacgactgggtatatttcctctctgggtgttaaataccacattatttgaaagctgggagatcgttggaccttacccttcctggtgggtttttaacctactgctattgctagtacaagggttgaactgcttctggtcttacttgattgtgaaaatagcttgcaaagctgtttcaagaggcaaggtgtccaaggatgatcgaagtgatattgagtctagctcagatgaggaggactcagaacctccgggaaagaatccccacactgcgacaaccaccaatgggaccagtggtaccaacgggtatctcctgactggctcctgctccatggatgattaattactcaaaactacaagtcccaagcaaagtgaactatttgttcctggaagtatttaataagttgcaaatgcagttcctttcataatatctcagcaccagaaacaaaaattaagattatcaaagcattttgaatagtgcactgccatgtgtcctgtctgtgaatgaagaagaattaccattctctctttgtaggcatgctgtatgtaattgacacaagggaacagtatttgcatttgtactgtcttagaatattatttatttttttgtatttgtaaatctgtggacaaaagagggtttcctcactccttttactcactgggctcatgacagtgaaggagatgctccatctgcttctccccctttctcttgctgtagtccaatgtgctatgagcatcagcttactttgtcacttagagcaagcaaaacccagtgcaagagtctcgttcagctctaaataggtttgctttcttttagttacagtgcccattttgaaattgcctatacagtcttagtgaccatttaaaccggacgaactaggtgtttaattttcactcttcatgttcaattagcagttcaaattaaagaagatggttattggagaacttttttgaatggttttgtattaaattgctttgaaatagatttcatttcttgtgcacacagccaagatttcttcaatgggtgtgagctagttgagggttaaccttgtaggttgcagagtgtatttgtttgtttgtttgtttttctctgtgatgaggtcagtgctctgattttgaaggaggatattcactgaagctcatagttataaacaaggaaatcactgttaagaatgggaatttgtcctgtgttctgggaataacataaagagagcaactgatttcagccaggttttgccactaccctataattagtgcagtcttatgttataaaagaaagaagttaactatatttggggacaaaaaaatatttcaagagttgataaagattacctgtgcagtgcagagcactttaatgcaaccagctttcaagaaaaagccctatctagtacttgatgttgatgtttttattttgctgagcaaaataaagccaatgggagaaagactattttaccctttgcttttctccttaaacgtaatccagatgactttcctgttactaaacactgagcagcattacactacaatgcttctttggtttccaggaatttttttcaaatggggctgtttctggaaaaatgaaaaattctattggacaatggcaatatcaacaatgaggaaaattactgaagaataagtttccataagtctcctacatagcagtgttatttatgtacagataagaaaaccatatgtcagccaaagattttatctcttcttctaacttttagtaagaggaaaaagggattataaaacccttcataaatcaagaaggccatcacttagaacgaaccccaaacaaaaatgccataatataaatgtgtgaatcagggctgtgaagacaacagcagaaatgctaacaagcgtgcagaaacaccagagagtgcgtatcctgctcagaaccattcacatttaattcaattcttggaaaaaattaaagctttttgcccacaatttgcaatctgtgggttaatagttaaaagaatgttcccaaccaaaaaattcttaccgtaatattatatcttgccctacttatttacaaaataatatgtttctgttatggtccttagtaataattgaagaggcttagaaatacatctgcttgtttattgagaaaacgatgcaaataattctgcttttagagccttgttattttatttcacaaaacaggcatatgtctaggagtgtaatttgtggatggttgagtttgtaagaacaatcataaaaggacttgttagtctccagaacatctgctaaaatgcaagtatatgtataaggtaatagcatattacagctgaaaattttgagaaggtaaaagtttcttaattaaaatatgaacatatttagcttgctttagtgtctggggcaagtcctctcaatggctaaaattaactttagagatccatgtgttcaggtttagatcatatgacactcgagcacagaagaataatttcaaggaggtcatcttgtaaattaaaggtttagaagaattgcataaaacgtagtaaatggggtctgtcattagcaaaggcaaatctaagcaatcatttttccccccagaagttacttagaaggagaactgggaacacttggggtctctctaactgatggcattcacttcacacagtcgtctatgttatccagagatttttatttcattttacattttagggcacagttctttggggctaattaaaatggggtttgcaggctttttatggtgaagaataatatatctctgtctatagctttcccatggtagcctgataaggctgagagagaaaaatatgtgcagtatctcatcctccccctgtaccaggccatagctttgaagtgtattttgtaaattcaactataggttagtcagaatgctgtttttcgttaattaacttagcctgtgttgatatctcctccttcctggtcacattcaaaccttcccagagtacaaaggggtatgtagaaaggattccagaagaagtaatactttattctctaatgttaatagcttttctggatctcttagtagggggaaagtagaaaatcgagtagaatttggcctcaggtcaataaatgatataaaaacatgtgttctatttatgtatatatatgtatgtttctccaaaaagtgataaaaccaaaatatcactgactcatccctacccatattcttttcataaaacccactcaccaggtacaatagaaacttccctccttgtttgtcagcctcctgttcatgttccccacacacctgaaggtggtagaatcttttcagcctcttagccagtgagctaaatatggctaagcacaggtcataagagcacctaaggccagcatataagccaactacagttcacctttccaaatttggtcctatggatgttgagcatagggaagcaactctcagtattttggattattcaagtgtatgtggtaaaaatgcagatgattgctgctttaccccagggtttattagcatcctacttctgctgggctgcatcattatataatgccacaggcatctagtcaaggtaaagaagccagaaaggttaggcaagaagtgagataaaatcagatcacctttgatcaaaatggttggtgaacctccacatgtccagttctgttgccaaactttccattcagagtatttggtggagtttgaatttgagcaaactaaatgccttcatcttaggtagaaagggcctgaatcttccattttatattcaaacctcattgttatttggcctaagtaaaaagtcagatttcatttccatttacctgagttcgctttaaagagcttttcaaagagagctttatagacacccacaattgtccccaatctcttcatgatgttgcattaatagttgtttttgtccctttcttggaaatgttaatgccaaagttgcctgaacattgggcggttttcttaatttgaagtataaaaattataaagagtaattccaaaggtattaaaagattgtttaacagtatgtgtggtgatgtcattatctccagagaggcttcaagaaatcctttggaaataaaaagttaaatgtttacatttcatgtggtatttcaggtcttcaggttctgattagcttacttttttcctttgtctttggctgatttctgctttgtagataaataataatagccctgagatgtttctaacatttaaataagaaaaaaatcaaatcgaagtcagcctgctggaaaagtgatcacatggcagttgcagtaacttgtatggaaagagaaaatgcaatgagcccagttactgcacttgccactaccatgctgtccatggaaggaataatcagcagttcagttgtcacaagccgcccttgaagaaaacgcagcaaaatattttaaaatgaagatattgcagtccccagagccagtgaaggtttcttttggtaaaatgaaattgtgccattgtcaaagtaccccgtagtgatgagcactgactggttcactggccacattttagttcttcataataataggccacaaaagggctctgtggtttgcctccatgtgcactggcccctccccacccctagggggcactcagtagctgctgagaaggcctgtccacgaggctgttggaacccctccaataaatacttagaggtagtgtatctgatgcttgttttcgtggagaaaattgtattggagaacttaaaacatcacgaatatttttaataggatccgcagacacccaaaggagaagcttggtcttttccaggtatttccaacttgagttcaacccaaagcctttgaaaggaatgcattaccacatgaccacatgctgagaccccatggggtctaacacgggacctaagaaagtctctgcagccagatagtacatggtgtctccacaaaactaggcattctggagattgcccagaaagggatgtgaggggaccgttaagatctgtcttgcttatctcatgcactcacattccttcagcctcctggagttcctgataaaaggaagccagggtgttgacattttttagctattgatttcccaatagcttgtggatcagttgtacacccacacttccttctctgcctaattccgtttttctggaaaaagtagtatgcccatgtatgtgtgtttttcttaacacaggtccatgaaagtttggcttcctggtttgatgtctgttgcgtggcctggaaaccagggagcagcaactattgagatggtttctgtgttcagtgaaaaattctatttcattgagacaattttttctttatccacagtaattttttgacactgtcatcatgaaactacccttaggaaaataagattacctgc

SEQ ID NO: 7023 - DNA, 1722 bp, Homo Sapiens
  NM_203497
ggtctgggggcgttctctcgagtccgggccgcaagtcccagacgctgcccatggaggcgtccagcgagccgccgctggatgctaagtccgatgtcaccaaccagcttgtagattttcagtggaaactgggtatggctgtgagctcagacacttgcagatctcttaagtatccttacgttgcagtgatgctaaaagtggcagatcattcaggccaagtaaagaccaagtgctttgaaatgacgattccacagtttcagcctcagctcctggcaacctccagtctcctttctgcttctaatttctacagacagttcaaggaaattgctgcagttattgaaacggtgtgaagacggattctttggttgataaattgctatcattctaaagtcatggacttcactttcggcaacaaaactaaataaggatggaacatttattgaatgaaaaatgcacttttgtttttccatttttttaaataataaaaatcagacaaacaggaactgggtagtggtgatgaatgcaaaactttgtgaatgtgctttataaaagtgataattagacactttagaggatatacttggtgataatgtgaatgatgtaatcagactaacagttgaatcattgctgttggaggcagcacaaatttatgtgttacaacagtagtttaaaaacttgtactggatggaacccattttataaacagtcttatttggagtcatgtatataaaaatatatataaattagaaaagtagtatttgattaggataactttacaaattcaatagtatagccatcacttattataatggcaatcagaagagtgaggcttcttttttcaaacttttgtaatcagattaagattgaccattgctcctttacacagtattagtctagcattcaattatttctgttattaatggttgtagaaagttcaaatacatacgcagagttggaaagacgagttttagtctgagttctgtacgacggagttaacccgttagcacaagttattgcattagatgatctctgttgaatttaaatacataaacctgttgttaaacgcttttatactataaagccaccacattgtatggcatttgtttagaagtaagcaaatagaccaccggaatagaatagatggcctagaaatagatcaagacattctggtccgccatattagaaatttaaaccctcttcacaccctgtctgcatttctgcaggtctgtgtgagtccactttcttttttgttccctgctaggtagcacacagctgtgaggagcccaggactgctgcctgccgcagcccacctgtgcgctcagattcctaccagcttgatgagttagctgatgggccatttgtgcataccaactacccacagacatttctattacccaccctctggatgccagtgcattaatgattctagaattaggagaaaccaaagatcccttctctctccctcccacaaccagtgtcgtcgtgttcctagaaataagagtagaaacccctctatctgggttaaaacagcaaacctgccttctgtaactgtgcatgaggttcctctgtctcccacttacttcggattaacaccttcctctttccccttccctgtttgcagggtagcatttctaggtttaaggcaatatgcaaaaagacccaaagttaggccctggctcaaacactgtgggtagcagatttgaaataaatttaaattgcatgttt

SEQ ID NO: 7024 - DNA, 1529 bp, Homo Sapiens
  NM_205548
cgtttggttccgcttcgctggcgcccgccgggctcttcccccgccgaggcctgtggtttgtggagtcgaatttccctgccaccagtgcccggttagcaggggcgccagcctgggcgcctgcgcggacggcgggcgtcgtcaccatggcagcatccgctggaggcccaggatcttggagtgaaaatatactggaatattttctgagaaatagccagattacagcagaagacggtgctgagatcacctggtatcatgcagctaaccacaaggcacaaacaaatgaggcactgaaaagtactgctcacatgatagaggctgatgtccttcttccaagtgatggatcagaacacagccagccaattatggcccatccccctgaaacaaacagtgataatactctacaggagtggctgactgaagttatgaaaagcaataaaggcatcaagctggatttcaaaagtctggcagttgtagaaccatccatgatgctcttggaaaatgtgaagaggcatctgaagcgtcctgtatggattaatgccgatattcttcctggtccaaatggaaatagcaaagtaatagatgcaaaaccatttttagacaccgtgacatccttctttccagacgtgacgttttccctgggttggacaacaggatggcatcctgagaaagtcaatgaagggtacagttggacaatggtgaaagagatggaatatatatgtaatgaactaagtcagcctgtaacgttccctgtcagagcagcattagtcaggcagtcttgttctcagttactttggctgttaaagaaatcaaacaggtacagcctgactatttggactggaaaaaatgataactattccgttgaagatttactttacattagagaccattttgacaaaaaacaagttttctatgacatcttggaaccacaaaaccatgaatttaaacaagccattggaatcaaagttaatctctaagaagaagattctcaattatttcctgtgttttggtttcataatccttctctccattggtctgaattaattaccatataaattatggttattgattgacgttccaagtcatctaatcaagaaacgtttattgtatgcttactctgtgggcatatgtccttataatagtgcacttacataaaagatttggaaagaagagatttatttacacacgtggcctagtctaataataattcaggaaaatgatactctgcaccccttcataaaaatagttttgataaactaaagatgattggcagaatccatatgtcataaaacaggtataaatcacatgtgcttggcacttgcattacagagattatgaaaaatatggtactcttttcctttttcctagaaaactggttattttagagataacaaaaaaggaagagggcttttaaaatgtttttaattttcacaggggtcagcagctgtctcatatcaagatctattaatccatttcctgaaactgtagattaaattagatagatctagaatttccatgtgattgagaagcat

SEQ ID NO: 7025 - DNA, 943 bp, Homo Sapiens
  NM_205767
aaatccgggcccttggtcccccgcgcgggcgcgggtggatctctcgggctctgacttgttttcgggtcaccttcaggcttcagccaggcacctgacgcctctttcccctcacggtgccagggccgggccgaactacatttcccaggaggctccgcggccaggtgcaaacagcgccgtgctgactacatttcccagacagccttgcggcggcccgggccttaaagcgtccatttcccagcggccctccgctgcgagaccgcagcccttctctggagtctcagagccgcaagacaccacgactcccagaggaccttgcgtcgggcaagaaagactacaccttccagaggcctctgcggcgccgcgacaggaagcggcgggcgagccgagtgtccttgcgcgtggatccgagcgaccatggtggcccgggtgtggtcgctgatgaggttcctcatcaagggaagtgtggctgggggcgccgtctacctggtgtacgaccaggagctgctggggcccagcgacaagagccaggcagccctacagaaggctggggaggtggtcccccccgccatgtaccagttcagccagtacgtgtgtcagcagacaggcctgcagataccccagctcccagcccctccaaagatttactttcccatccgtgactcctggaatgcaggcatcatgacggtgatgtcagctctgtcggtggccccctccaaggcccgcgagtactccaaggagggctgggagtatgtgaaggcgcgcaccaagtagcgagtcagcaggggccgcctgccccggccagaacgggcagggctgccactgacctgaagactccggactgggaccccactccgagggcagctcccggccttgccggcccaataaaggacttcagaagtgaaaaaaaaaaaaaaaaaaaaaaaaaaaaaaaaaaaaaaaaaaa

SEQ ID NO: 7026 - DNA, 1845 bp, Homo Sapiens
  NM_205847
gcttgcagtagcgggcggcagagctggagtgaagggagctagtggtaaagggagctggtggaggggtggcggcaggggtaaggggcaggggacaccctctagacggagagcgggctccgaggtcctggctggccctcggtgcgcccgcccctgtgttggtcccacaatccctggcaatgagaggccagggtttattggacagagtcagttgtggggttcagagggtcagcaatcaatcaatcctccgaatccagagatttagacccagtcgtccgtattaggactggaggggggtcaataggttcagtgtttgagatgccaagggaacctgtcttttgatttggggttcaacatacagaggtagcagtcaccattatgctcaaagcggtgatcctgattggaggccctcaaaagggaactcgcttcagacctttgtcttttgaggtgcccaaaccattgtttcctgtggcaggggtccctatgatccaacaccatattgaagcctgtgcccaggtccctggaatgcaggagattctgctcattggcttctaccaacctgatgagcccctcacccagttcctagaagccgcccagcaggagtttaaccttccagtcaggtacctgcaggaatttgcccccctaggcacagggggtggtctttaccattttcgagaccagatcctggctgggagccccgaggcattcttcgtgctcaatgctgatgtctgctccgacttccccttgagtgctatgttggaagcccaccgacgccagcgtcaccctttcttactccttggcactacggctaacaggacgcaatccctcaactacggctgcatcgttgagaatccacagacacacgaggtattgcactatgtggagaaacccagcacatttatcagtgacatcatcaactgcggcatctacctcttttctcctgaagccttgaagcctcttcgggatgtcttccagcgtaatcagcaggatgggcaattggaggactcaccaggcttgtggccaggggcaggtaccatccgcctagagcaggatgtgttttcagccctggcagggcagggccagatatacgtgcatctcactgatggtatctggagtcagatcaagtccgcaggttcagccctctacgcctcccgcctctacctgagccgataccaggacactcacccagaacggctggccaagcacaccccagggggcccatggatccgagggaatgtgtacatccacccgaccgccaaggtggccccctcggctgtgctgggccccaacgtctccatcgggaagggggtgaccgtgggtgagggtgtgcggctccgggagagcatcgtcctccatggagccactttgcaggagcacacgtgtgttctgcatagcatcgtgggctgggggagcaccgtgggacgctgggcccgcgtggagggtacccccagtgaccctaaccccaacgatccccgagcccgcatggacagtgagagcctcttcaaggacgggaagctgctgcctgctatcaccatcctgggctgccgagtccggatccctgccgaggtgctcatcctgaactcgattgttctgccacacaaggagctgagccgaagcttcaccaaccagatcatcctctgagtagggctgccagaaggcccccagctcctacccactccccttgaggctgctgcctgcttggccagcctctgtccagaaaggaccagagaaagccaggctggatcgtcacatgccggggagcaatgtggatggcctggggactcctgggttttctccctcccgactccctaataaaccccgtgaaccttggagccagcaaaaaaaaaa

SEQ ID NO: 7027 - DNA, 742 bp, Homo Sapiens
  NM_205853
gggtctctgcagccatctgctttcatcagggctgcagcccccaggcagcagtactgggagcccctctcatctccgagaataaactctgaagccagcgaccctgcggacctgaatcatcagggagcctgtcagaggaggggcagtgactctgcgggacaagcaagcaggctatataagtttcagaaggctgggctccactcagatcttttccagcagctgctgcctgccagagaggcgccttcagagacccagcgcttacacaatacccaccatgtcccaggctggtgctcaggaagcccctatcaagaagaagcgcccccctgtgaaggaggaggacctgaagggggcccgaggaaacctgaccaagaaccaggaaatcaagtccaagacctaccaggtcatgcgagagtgtgagcaagctggctcggccgccccgtcggtgttcagccgcacccgcacaggtaccgagactgtctttgagaagcccaaagccggacccaccaagagtgtcttcggctgagaagtgtgcgccactccccttgctgcccgaatgctcggaaacaggagccttacccaggaactcttttttatgccagaacgcttcctctcccctgctgtctctggggctgccaccctcccccacagtccaggcccttcagccaagggctctgcaccagcaccttggaagcaccaataaagaggatgcccacgtggccccagcaatcagaaaaaaaaaaaaaaa

SEQ ID NO: 7028 - DNA, 462 bp, Homo Sapiens
  NM_205854
ggggtgtagaaacaggcctgttaaggagaggccaccgggacttcagtgtctcctccatcccaggagcgcagtggccactatggggtctgggctgccccttgtcctcctcttgaccctccttggcagctcacatggaacagggccgggtatgactttgcaactgaagctgaaggagtcttttctgacaaattcctcctatgagtccagcttcctggaattgcttgaaaagctctgcctcctcctccatctcccttcagggaccagcgtcaccctccaccatgcaagatctcaacaccatgttgtctgcaacacatgacagccattgaagcctgtgtccttcttggcccgggcttttgggccggggatgcaggaggcaggccccgaccctgtctttcagcaggcccccaccctcctgagcggcaataaataaaattcggtatgctgaattcaataaaaaaaaaa

SEQ ID NO: 7029 - DNA, 5779 bp, Homo Sapiens
  NM_206808
aggcaaagggcggggcgcgcgcgtcgggaagatggcgctacgtctgctgcggagggcggcgcgcggagctgcggcggcggcgctgctgaggctgaaagcgtctctagcagctgatatccccagacttggatatagttcctcatcccatcacaagtacatcccccggagggcagtgctttatgtacctggaaatgatgaaaagaaaataaagaagattccatccctgaatgtagattgtgcagtgctcgactgtgaggatggagtggctgcaaacaaaaagaatgaagctcgactgagaattgtaaaaactcttgaagacattgatctgggccctactgaaaaatgtgtgagagtcaactcagtttccagtggtctggcggaagaagacctagagacccttttgcaatcccgggtccttccttccagcctgatgctaccaaaggtggaaagtcctgaagaaatccagtggtttgcagacaaattttcattccacttaaaaggccgaaaacttgaacaaccaatgaatttaatcccttttgtggaaactgcaatgggtttgctcaattttaaggcagtgtgtgaagaaaccctgaaggtcgggcctcaagtaggtctctttctagatgcagtcgtttttggaggagaagactttcgagccagcataggtgcaacaagtagtaaagaaaccctggatattctctacgcccggcaaaagattgttgtcatagcgaaagcctttggtctccaagccatagatctggtgtacattgactttcgagatggagctgggctgcttagacagtcacgagaaggagccgccatgggcttcactggtaagcaggtgattcaccctaaccaaattgccgtggtccaggagcagttttctccttcccctgaaaaaattaagtgggctgaagaactgattgctgcctttaaagaacatcaacaattaggaaagggggcctttactttccaagggagtatgatcgacatgccattactgaagcaggcccagaacactgttacgcttgccacctccatcaaggaaaaatgatctgttaaatgaagctgtcatcaggctaaagggtattgaagctgcagagggatcaacttgtgcttgccagaggacgccaatgaagtttgaaacaccaacaatcagagattttgtttctgttcctcattaaatcatgagcttttgtgccgagactctggacgactgttccttaagaaattaacagaatgggaagttttaaactctacaccaaccttttcatgacctacacagcagcaacgctgctactcttagacaaacaccgcggggaaggctgttctgtttatttaaatttgtaaatagaaaacagttgttttttactttcatttttcacctcctcctacgcccttttggattatttcctctgcggcccctagcatgagccccaaccaggcctccccttttccccacttctctcaattcccacaggaagcccgagaggtgaggagctgaggttagacaccaggagaggcaccatcacacaaaagcgcggccgcagagtcccaccgccaccaggcgacccccacccagagagggacagacatgcggggagccagcaccgggcaagatggctctggggatcctcattctgtgaagacaccaactcatttctcaaacacaggatccaggagacagatagctcctaaatggagatggcacatgctccgtggggtccctcatagaggagtgccaccctccacactggccacgctgggctgccccagagcggccagaaaggaaggtgggagctagccccatcctcactcagaggccggaaggaggaagatggcatctcgccaacttcagagccgaatggcctctagccacactgcttccagaccccagacggggcagcagcagcagttcccagaggagcacccattgttgcagctaggacccaccaaggatgggactcctggagtcaggtgcacaccaggtaacccaggaccacgctgtgcacccccagtctgcccctctgctcagaacacagagggatgggaggatggcttggcagtgggaaggcaaaagaaggcctctctcactctgcccctgccatacgcacccgctgagggtgttagaagcagtggaggcagagctggccctaagcaaaagaagaaaataaacctcaccttgtccttcctatgggcagccctcaccccaatctaactaaccttcccatcctccagcctaatccaaagaagcccttggcttgaggggatgaagggcttgcgttctagtctccaccccagccccacaggcagccagccagccagccccacacagaggggcctcctcaaggcctcactgggagcctcctgtccccagccaaggagccctacagacctggggaaaagcaggcccctccgcaaggcccctgggtggtgcggaggccggaccggctaggcctcccgctgctggccactcccaggccacgggttcctaggtcccaaccacattggactgctcgccacgccactgccctcatcccaaactgctttgttcaaacaaaaccaccttgtttcagtctccccaaatgtccagttcattatcttcctcataacccatggtccctattagggtaggatcatgagactaagacctatgagagccacaaatctggaccaaagtcccattccctgaacagagacccaaacgacgagggtcccagaagagagttcagtcctgatcagaaacccatggtgccttagtccttgaagaacaaaactctaggaagaagatgctggaaggcaaagggtattccccctctttccccacccgcgtctctgtggtgccatgggtgggcccaggtaccctgggaaaggtgggagagcagtcaagggtgggtgtgtgatctccactgggctcactgggcacccccgacacggggaagtgagagctgcccgactcctgagccaggcgtgggtgacaggaagaggaccttgcagctaatctgattcattagaaaccatacctgtttatgttttgtgtagctcatcacaagccgcttagccatatcacccccgttattaattcttggggtctaaattatgggtaacactattaaaacattatcagaactaatgagaaacaattacttagaaaatgagccgggacaagactgagttgggaacatcagtggtgatcactgtagattagtttaataaatcatcaggtgcaaggcaagactgactgtatgtatgcaaagccccgtcacgggaaaatgaaattgagattttttttttttgcataattttttcattaatctcaataggacccgtgtggtgtagattgctttattcccctaataccttgcctgaggcgggggggggggggggtgcccaataatgtcttcattgttttactgaggtcttaatgacaatctgtgacaacctcattttaatgtatagaggattatatcaatacagtcatgttttattgaaatggtgaagggaactccagtcagagtcaggcagtgtctgtgagcacaagttaggaagtttctcggcatccgggagcgttcccgtctgatgtcccagtgttagtcctcccggccgccctcccctcctctcctccagggacggctgggaaaacagtcctgcgggatgaagacttcaccgcctccgatttgaatttgaaagtaactccttccgtggcatatttcgctgggcagatagaacaaaccatgtcgttttcccccgtctctaaaatagacatattattatcattcacacttttgcacccggtcgttttgcgggagttcgggaaactgactttcttcattggggacattgtaattttctgatgatgccacgaggagaaaaaaaatacgggtttgttttaattggaaggaccttccgcttttatgatttcggtttaccttggaaaactgaatcttctgtgttttatttctttcctctagtactagaaaagcaatgaattaattgcacaaaacaggttctgagacggcccgcaggccccgagctcgtggacgcggccgagggtcgggtgtgacccgcggagccgctgccaggcttcccagctcgtcttcgcggggaggcgggaggcaggaccagaccccagcatttcagcgtgaaagtcttcgcctttctttccgcgctgtctttcccgcgggcggagcggcgtacctgagcgcggtccccacggaggatcagtgactttcccagaccccgcgggcgagcccgcgcttgggacccggcagctctgcgcgggctggttttggagggggtggtgttcgtttgtttaaattccagttgttatttggcagcatatcgccttccgagtcagtaagaattgcccacgacgtaaagagcgacttgcaggaaggggccgaagccgtcgttagcgcccgggcggcggcggccactcgaaccccgtttccgccaagcgcgctgcaacctgcggggcgagttcgttttgttttgccaaaatcatttggggacttctttgtcattcatgcccttccttttaaatgatttttatttttttccactgtaagtgaccggctgggtttgacttttgcttcttccgacggaagggcaccgcgagccggggtgggcggccccgcgggcaggaggagcgcggggtacacgcggtggccgcagacgccgagccctgcggagccccgaggcctcgtcgcccgcgcccccggtgcgcgcggagccggggccgaggccgggccaggaggagtgtggcggcccaggaggcctggactgtgggccctgctcgcccgcccgccgcgggccgcccggagcccgcgcgcctgtcgcgcagcccggctgtaatggtggcagatcaaaggcggccccgtgtccccgcggagcccgggacaatcccgcgcctttgtgcgctgttgctaggagcccgagaaactaagagaaagtgtcaggagcatgttaatcagactcgttacactgtaacaataacgtctctctcgggtctcccaggccccagtacccccgcgcaccctgcgcgcaggccggacacctgcgcagggcccttgcgcccgccctggggtcccgccggccctggggtccctgcagccccgaatccgcacccgagccacgcggaacgactagccccgaggggccccgcaggctcccggtgcagctccctggtcgtggtctccttgaccgaagccccggcctcacaccgcctggccgcgagcccgagggacgcagggacgatcccggtcccctgcttttcagtcctccagtcgaatcgcccactttgttcaatcacagtattcgaatcaagaggaaaatgaacattccctttatggtagctttttggttatgagttttggcaaaactgttaaatcaactttgccgatttcccttgggaatccctggaggccactctaagtggtaatcccaagtttaagaaggaaatggggaaattttgctgagagtaaagatgtcgccgaactttttgaagggatttgcttcattcattcatttagtcattcaacagacacctgttgaacccgactgggtgccagaggggccagtcacaggacttattccagatgaacttttcttttgaaattagaatgcccttgtggaagccaaaggaggagcagaggcctaaaataatgtcaagtgtcaaagcaaaaagaagtgccattggctactacagtgtgtgatgataacaagagaggtgcgaattaggaattaaaaacgtttgaaaaactacaggccaaaaaaaaaa

SEQ ID NO: 7030 - DNA, 2012 bp, Homo Sapiens
  NM_206826
gcggccgccaagcgatccctgctccgcgcgacactgcgtgcccgcgcacgcagagaggcggtgacgcactttacggcggcagcgtaagtgcgtgacgctcgtcagtggcttcagttcacacgtggcgccagcggagagttaaagaaagcaagtaaacgcatgacctgccataagcggtataaaatccaaaaaaaggttcgagaacatcatcgaaaattaagaaaggaggctaaaaagcggggtcacaagaagcctaggaaagacccaggagttccaaacagtgctccctttaaggaggctcttcttagggaagctgagctaaggaaacagaggcttgaagaactaaaacagcagcagaaacttgacaggcagaaggaactagaaaagaaaagaaaacttgaaactaatcctgatattaagccatcaaatgtggaacctatggaaaaggagtttgggctttgcaaaactgagaacaaagccaagtcgggcaaacagaattcaaagaagctgtactgccaagaacttaaaaaggtgattgaagcctccgatgttgtcctagaggtgttggatgccagagatcctcttggttgcagatgtcctcaggtagaagaggccattgtccagagtggacagaaaaagctggtacttatattaaataaatcagatctggtaccaaaggagaatttggagagctggctaaattatttgaagaaagaattgccaacagtggtgttcagagcctcaacaaaaccaaaggataaagggaagataaccaagcgtgtgaaggcaaagaagaatgctgctccattcagaagtgaagtctgctttgggaaagagggcctttggaaacttcttggaggttttcaggaaacttgcagcaaagccattcgggttggagtaattggtttcccaaatgtggggaaaagcagcattatcaatagcttaaaacaagaacagatgtgtaatgttggtgtatccatggggcttacaaggagcatgcaagttgtccccttggacaaacagatcacaatcatagatagtccgagcttcatcgtatctccacttaattcctcctctgcgcttgctctgcgaagtccagcaagtattgaagtagtaaaaccgatggaggctgccagtgccatcctttcccaggctgatgctcgacaggtagtactgaaatatactgtcccaggctacaggaattctctggaattttttactgtgcttgctcagagaagaggtatgcaccaaaaaggtggaatcccaaatgttgaaggtgctgccaaactgctgtggtctgagtggacaggtgcctcattagcttactattgccatccccctacatcttggactcctcctccatattttaatgagagtattgtggtagacatgaaaagcggcttcaatctggaagaactggaaaagaacaatgcacagagcataagagccatcaagggccctcatttggccaatagcatccttttccagtcttccggtctgacaaatggaataatagaagaaaaggacatacatgaagaattgccaaaacggaaagaaaggaagcaggaggagagggaggatgacaaagacagtgaccaggaaactgttgatgaagaagttgatgaaaacagctcaggcatgtttgctgcagaagagacaggggaggcactgtctgaggagactacagcaggtgaacagtctacaaggtcttttatcttggataaaatcattgaagaggatgatgcttatgacttcagtacagattatgtgtaacagaacaatggctttttatgattttttttttaacattttaagcagactgctaaactgttctctgtataagttatggtatgcatgagctgtgtaaattttgtgaatatgtattatattaaaaccaggcaacttggaatccctaaattctgtaaaaagacaattcatctcattgtgagtggaagtagttatctggaataaaaaaagaagatacctattgaaaaaaaaaaaaaaaaaaaaaa

SEQ ID NO: 7031 - DNA, 3250 bp, Homo Sapiens
  NM_206828
gaaacacaggctggaagcaagacctgacctgagggagttcttcagccttaacctaaggtctcatactcggagcactatgacatcgccccagctagagtggactctgcagacccttctggagcagctgaacgaggatgaattaaagagtttcaaatcccttttatgggcttttcccctcgaagacgtgctacagaagaccccatggtctgaggtggaagaggctgatggcaagaaactggcagaaattctggtcaacacctcctcagaaaattggataaggaatgcgactgtgaacatcttggaagagatgaatctcacggaattgtgtaagatggcaaaggctgagatgatggaggacggacaggtgcaagaaatagataatcctgagctgggagatgcagaagaagactcggagttagcaaagccaggtgaaaaggaaggatggagaaattcaatggagaaacagtctttggtctggaagaacaccttttggcaaggagacattgacaatttccatgacgacgtcactctgagaaaccaacggttcattccattcttgaatcccagaacacccaggaagctaacaccttacacggtggtgctgcacggccccgcaggcgtggggaaaaccacgctggccaaaaagtgtatgctggactggacagactgcaacctcagcccgacgctcagatacgcgttctacctcagctgcaaggagctcagccgcatgggcccctgcagttttgcagagctgatctccaaagactggcctgaattgcaggatgacattccaagcatcctagcccaagcacagagaatcctgttcgtggtcgatggccttgatgagctgaaagtcccacctggggcgctgatccaggacatctgcggggactgggagaagaagaagccggtgcccgtcctcctggggagtttgctgaagaggaagatgttacccagggcagccttgctggtcaccacgcggcccagggcactgagggacctccagctcctggcgcagcagccgatctacgtaagggtggagggcttcctggaggaggacaggagggcctatttcctgagacactttggagacgaggaccaagccatgcgtgcctttgagctaatgaggagcaacgcggccctgttccagctgggctcggcccccgcggtgtgctggattgtgtgcacgactctgaagctgcagatggagaagggggaggacccggtccccacctgcctcacccgcacggggctgttcctgcgtttcctctgcagccggttcccgcagggcgcacagctgcggggcgcgctgcggacgctgagcctcctggccgcgcagggcctgtgggcgcagatgtccgtgttccaccgagaggacctggaaaggctcggggtgcaggagtccgacctccgtctgttcctggacggagacatcctccgccaggacagagtctccaaaggctgctactccttcatccacctcagcttccagcagtttctcactgccctgttctacgccctggagaaggaggagggggaggacagggacggccacgcctgggacatcggggacgtacagaagctgctttccggagaagaaagactcaagaaccccgacctgattcaagtaggacacttcttattcggcctcgctaacgagaagagagccaaggagttggaggccacttttggctgccggatgtcaccggacatcaaacaggaattgctgcaatgcaaagcacatcttcatgcaaataagcccttatccgtgaccgacctgaaggaggtcttgggctgcctgtatgagtctcaggaggaggagctggcgaaggtggtggtggccccgttcaaggaaatttctattcacctgacaaatacttctgaagtgatgcattgttccttcagcctgaagcattgtcaagacttgcagaaactctcactgcaggtagcaaagggggtgttcctggagaattacatggattttgaactggacattgaatttgaaaggtgcacttacctaaccattccgaactgggctcggcaggatcttcgctctcttcgcctctggacagatttctgctctctcttcagctcaaacagcaacctcaagtttctggaagtgaaacaaagcttcctgagtgactcttctgtgcggattctttgtgaccacgtaacccgtagcacctgtcatctgcagaaagtggagattaaaaacgtcacccctgacaccgcgtaccgggacttctgtcttgctttcattgggaagaagaccctcacgcacctgaccctggcagggcacatcgagtgggaacgcacgatgatgctgatgctgtgtgacctgctcagaaatcataaatgcaacctgcagtacctgaggttgggaggtcactgtgccaccccggagcagtgggctgaattcttctatgtcctcaaagccaaccagtccctgaagcacctgcgtctctcagccaatgtgctcctggatgagggtgccatgttgctgtacaagaccatgacacgcccaaaacacttcctgcagatgttgtcgttggaaaactgtcgtcttacagaagccagttgcaaggaccttgctgctgtcttggttgtcagcaagaagctgacacacctgtgcttggccaagaaccccattggggatacaggggtgaagtttctgtgtgagggcttgagttaccctgattgtaaactgcagaccttggtgttacagcaatgcagcataaccaagcttggctgtagatatctctcagaggcgctccaagaagcctgcagcctcacaaacctggacttgagtatcaaccagatagctcgtggattgtggattctctgtcaggcattagagaatccaaactgtaacctaaaacacctacggttgaagacctatgaaactaatttggaaatcaagaagctgttggaggaagtgaaagaaaagaatcccaagctgactattgattgcaatgcttccggggcaacggcacctccgtgctgtgactttttttgctgagcagcctgggatcgctctacgaattacacaggaagcgggattcgggtctctaagatgtcttatgaatgcaggtcagagggtcacatgttaacactagagtctgtcgagaggtaggatttgacactggttttctcactatttttgggagattctgcacgagtcacgcacccccttcacatgacgctatgtactttctcacagggataataaagttagagcactctcgttgca

SEQ ID NO: 7032 - DNA, 4065 bp, Homo Sapiens
  NM_206831
cttgcccggcgcgacctgatgatgccgagcccaggccggttccggcgaagttaaaccctcggagctggcctcggactgctggggcgttaccccttcggccacccccgctgaccatggcagtgtttcatgacgaggtggaaatcgaggacttccaatatgacgaggactcggagacgtatttctatccctgcccatgtggagataacttctccatcaccaaggaagatttggagaatggggaagacgtggcaacgtgtcctagctgctctctcattataaaagtgatttatgacaaagatcagtttgtgtgtggagaaacagtcccagccccttcagccaacaaagaattagttaaatgctgaagaagccttcaggaatccaaatcctgaacatttggaatgagcccagatagaaatatcgaatgcaaagctactggcttcacagagacaaccatttatgatttgctgttctgtaagagtgtggattctttctatcaactgctgatatcatcttcaggaagcaagtccataacatgacatatctggattttgtgcttagaaccttaaattggaagcattcttaattatgcatctaaatttaaaagaagataatttcaaaacagtgctttctttcccttggtttcatcattttcatatcttaaaccaaattacttcggtatctgacaacagcatcatctacctcagtcattaggatttcttaataaaaaagagattgtatttttgacttggttattaagattattaaaattagcccttcctttgaaatatgacatcagctttgctgttctaaatttaaaattagttgcttcatcagtaccacacttccagtttctataccaagccagtctcctcagttttcccattagaatggacatgttctgttcagcgtgtcatttctgtaatgcttcatgcagagagtttggtcatagtattaaagagaaaatacagtgaggtcacaatgtctccagagctaaaagttagtgaacaagaaagaaagtccaaaatgaagtgatgaaagaatgaggacttttcttatattctgcatattccttggaagtcaggacaagatgaaaagaaaaacatccaaaagaagtgaaattggtgacagaatgagaggagcaaagcataccagtgtagtaagtggaatgtttgaatgactttgccaggtcagagcaagtaatatttctgtatctgagtttttgtttgtgttttgataaggctaatgaaattgcattccaggtaggggttaacgtcaaatttccatggctggtagctgtgcttttggcatatcacagtgttgtgtcactactacaaggtaaagcatctacagcggagaatgagcttgaaaatgagagacctattgtgaataaatatgcccatgagagcatatttaataagcctctataacatgcagccaaaccagacattcactcctgcagagaaatgttgccctggagaaaaagaaatatataaagataggctatcacccttcttttgctgcagtactaagcatagcaagaaattagaatcatttacattggaaatttgaaaattccctttatatacacaactttactgtgtataaataaaaaatatttattaatgcagtgatgtccgtcaggttgttttaggaatggcttctgcaattagaaaaatagcttgctagaatgtaaatgttctgttactggtaaatgtactgcacacattcattggacgttaaaacaagtgagtagccttttttacctgccagcagcatggctgtgtgcagccactaggctgagacaataaattaccaaaaattataatgtaccgagctgaaaatgctcagtacattatgtggcatattctggatgtgatgagaaatctcattgccatttgggacactgacatcccagaagtaatccacaactgctttgcaaaagcaaagtgactgctcagatgaacagagcagagtactcactcactatggtggcatcagctgcaaagcaaaatgaactgtcccatgatcatgttgatggttttctagatactgccaacatgttagctctttctgatgctgatgagtttcaaacacgaacagacacccttgatgtgggtttgctaagaacatagaagaacaggaagaaaagttgccaggttcacacatcccaggaaaaaagaagcataaaaagcattagcagtcagtgactgatgataatgctgcaataatgggaatggttttgtttctaaaccaaattatttctaaatcaaatcatttattgctttgtttctaaagcaattgagtcactaagtttgtgaactgtaggagaacacatcaagattgaatcctgtgttaagcagaaggtaaaaccagagccaggcgcagtggctcgtgcctgtaatcccagctactcaggaagctaaggcaggaggatcatgtgaggccaggagttcaagactagcctgggcaacatagaaagaccctgtctctaaaaaatcttcttttaattagcaaggtgtggggccttgagcaaattgcttgggcccaggagtttgaggctgtggtgagctgtgatcacaccactgcgttccagcctgtgtgacagggcaagacctcatgcctaaaaaataaagagaaagcagagtaaaactggactctgagatacgactaaagttctgtgtgatacgtgtgccttatttagctcaagacattcctggagcacctataaaaactgacttgtaatccaggctatgtctctttttagcttcgtaatctttggcaaggccattggattcttcagctgtacaattaggagactcgatcaggtgattgcctttctcagctgtcagttctctaatttcaggcttggtagcttgtaggaactgaaattgcaattaaaacctttataaactcaaactaaatcatgaattacagaaaaagtccattcttccaaaacttgatgttaccacacttacaagtttaaaatatgaagtcgactgtttaaaggattctgcatatattctagtgtgcacattcagaaacatttttcttggaaaaagtacccaacattttttataactgcacatattaatttattgccagaataaattgcattgcatgctaaataaagtcagataattcaaatccatttgcttttatgtagtttttcttctaaatgtcaacattttgaattaaaatgtttatgattttatatgaggtagaaatcttaactgctttggggtattgttaatagactttttgttatggacagtagtttttaaataaggaaattgccaatttctacagtttgggctctggatttctattgtttgggaaaaaaataactgagtcaagtggtagtaagacaaagttgacattcttagatgagtaactcagtttattacaaggaaagaaaactgattgtttaaggctgatgatcaattcttggagtggtttcagagcccagctctggtcagaagacaatttgaatcttagttcctccactgtgatctccgagaagttacttaataattatattctggtttgtgaaatctggatcatagtacctctttgacagggttgctgtgtgaacccattcattctgcaattagaaaaatagctgtcatgtgctatgcactaggcaaagaagtacctgtcacatgctaggcactaggggaagaagattcggtttctacatttggaaacttagtggaactagaagagacagaagcaagattacagatgagttagagcccccaaggaaacaaaccaggtgatgtgggagagagtaactgggtcaggtgactttttaagggagtctgagctctggcactttttctaagacctgaaggatgagaaggaaacagccttgtgaaaatgattaaatgagctagtatctataaaacatgacagctaatgcctgtcatgtgcaaaaaatggttaactattctaactccgaaaggaattaaacattgttttgcgctttctcctagtccatgttctgctgctgtaacaatacctgagactggataatttatcaagaataaaggttaatttggctcatga

SEQ ID NO: 7033 - DNA, 2847 bp, Homo Sapiens
  NM_206840
ctaggagctggcggtccgagctgtggcttgaaagaccgacgcgatgaagcccagacctgcagggttcgtggataataaactcaagcagcgagtcatccagtatagactatggtcgaagaaaaagaaatgcttttaggattcaggtagaaaaagtatttagcataattagtagtgagaaggaacttaagaatttaacagaattagaagatgaacatttggcaaaaagggcaagacaaggtgaagaggataatgagtatactgaaagctattctgatgatgattcaagtatggaagactacccagatccacagtcagcaaatcacatgaacagttccctgctgtctttatatcggaaaggaaatcctgattctgtttcaaatactcctgagatggagcaaagagaaaccacctcttcaacaccacggataagttccaaaacaggctccattcccttgaagacccctgccaaagattctgaaggaggatggtttattgacaaaaccccaagtgtaaagaaagacagttttttcttggacctgtcatgtgagaaaagtaatcctaagaagccaataactgagatacaggattcaaaagattcttctcttttggagagtgatatgaaacggaaaggcaagctaaagaataaaggaagcaaaaggaagaaagaagatcttcaggaagtagatggagaaattgaagctgtcctgcaaaagaaagctaaagccagggggttagaattccagatctccaacgtgaagtttgaagatgtgggaggcaatgatatgacattaaaagaggtctgcaagatgctcatacacatgcgtcacccggaggtgtaccaccacctgggcgtcgtgccccctcgtggagttctccttcatggaccaccaggctgtgggaagacattacttgcacatgcaattgctggggaacttgacctgccaattttgaaagtggctgctccagagattgtgtctggagtatccggagagtctgagcagaagctgagagaactatttgagcaagctgtgtcaaatgcaccatgtatcattttcattgatgaaattgatgctattacccccaaaagagaagtggcttcaaaagatatggaacgaagaattgtagcccaactcctaacctgcatggatgatctgaataatgtggctgctacagcccgggtcctagttattggagctactaatcgaccagactcgttagaccctgctttgagacgtgcgggaaggttcgaccgagaaatatgcctaggtatcccagatgaagcatccagggaaagaatacttcaaacattgtgcagaaaactgaggcttcctcaagcttttgatttctgtcacttagcacacctaactccaggctttgttggtgctgatctcatggcactgtgccgagaggcagcaatgtgtgcagtcaatagagtcttaatgaagctacaggaacagcagaagaaaaatcctgaaatggaagatttgccatctaaaggagtccaggaggaaaggctgggaactgagcccacttctgaaacacaggatgaattacaaaggctgctggggttgctaagagaccaagatcccctctcagaggagcagatgcaaggactgtgcattgaactgaatgatttcattgttgctctatcctcagtccaaccctctgccaaaagggaaggctttgtcactgtccctaatgtgacatgggcagatattggtgccctggaagacattagagaggagctcaccatggcaatattggcaccagtacgcaacccagaccagttcaaagctcttggattggtgactccagctggggtcctccttgctggtcctcctggctgtgggaagactctgctggcgaaggctgttgcaaatgagtccggactaaattttatatctgtcaagggccccgaattactaaacatgtatgttggtgagagtgaacgtgctgtgcgacaagtttttcaacgagccaagaactcagcaccctgtgtgatattctttgatgaagtggatgctttatgtcctcgaagatcagaccgagagacaggggcaagtgtccgagtggtgaatcagctacttacagagatggatggtctggaagcacgccagcaggtttttattatggcagccactaacaggccagatataattgaccctgcaatcctgcgcccgggccgcctggacaaaacactgtttgtgggtttaccgccccctgcagatcgccttgccatcttaaaaactatcacaaaaaatggtaccaaaccaccactggatgcagatgtaaatttggaagcaattgctggtgaccttcgctgtgattgctatacgggcgcagatctctctgctttggtacgagaagcttctatctgtgccctgagacaggaaatggcaagacagaagagtggaaatgaaaaaggtgaactcaaggttagtcataagcattttgaagaagctttcaagaaagtaagatcatctatatcaaaaaaggatcaaatcatgtatgaacgtttgcaggagtccctcagccggtgatgtctccagcagccggcttagaggagctagcccatcaagccggcagagaatcccccacacgctctgaaggacccactttcagctggacacaggcgcggcctcatgtaaacattttattttcaaatgaatgaggccaagctgaagctgaagctgaagattcttcccatctggccagccttgtgtgaaaatgccttcttcctctttaagaaaaaggacaatttttaaactgctgaaataaaatgactgttacatttttcaaataaaacttttactttgaactattttgactataaaaaaaaaaaaaaaa

SEQ ID NO: 7034 - DNA, 4786 bp, Homo Sapiens
  NM_206876
gctgcgtgacgcggcggcgcgcaagggacgtgcggagtgagtggcgctgcgggtggggccgtcggcggcgctggtgagagaacgccgagccgtcgccgcagcctccgccgccgagaagcccttgttcccgctgctgggaaggagagtctgtgccgacaagatggcggacggggagctgaacgtggacagcctcatcacccggctgctggaggtacgaggatgtcgtccaggaaagattgtgcagatgactgaagcagaagttcgaggcttatgtatcaagtctcgggagatctttctcagccagcctattcttttggaattggaagcaccgctgaaaatttgtggagatattcatggacaatatacagatttactgagattatttgaatatggaggtttcccaccagaagccaactatcttttcttaggagattatgtggacagaggaaagcagtctttggaaaccatttgtttgctattggcttataaaatcaaatatccagagaacttctttctcttaagaggaaaccatgagtgtgctagcatcaatcgcatttatggattctatgatgaatgcaaacgaagatttaatattaaattgtggaagaccttcactgattgttttaactgtctgcctatagcagccattgtggatgagaagatcttctgttgtcatggaggattgtcaccagacctgcaatctatggagcagattcggagaattatgagacctactgatgtccctgatacaggtttgctctgtgatttgctatggtctgatccagataaggatgtgcaaggctggggagaaaatgatcgtggtgtttcctttacttttggagctgatgtagtcagtaaatttctgaatcgtcatgatttagatttgatttgtcgagctcatcaggtggtggaagatggatatgaattttttgctaaacgacagttggtaaccttattttcagccccaaattactgtggcgagtttgataatgctggtggaatgatgagtgtggatgaaactttgatgtgttcatttcagatattgaaaccatctgaaaagaaagctaaataccagtatggtggactgaattctggacgtcctgtcactccacctcgaacagctaatccgccgaagaaaaggtgaagaaaggaattctgtaaagaaaccatcagatttgttaaggacatacttcataatatataagtgtgcactgtaaaaccatccagccatttgacaccctttatgatgtcacacctttaacttaaggagacgggtaaaggatcttaaatttttttctaatagaaagatgtgctacactgtattgtaataagtatactctgttatagtcaacaaagttaaatccaaattcaaaattatccattaaagttacatcttcatgtatcacaatttttaaagttgaaaagcatcccagttaaactagatgtgatagttaaaccagatgaaagcatgatgatccatctgtgtaatgtggttttagtgttgcttggttgtttaattattttgagcttgttttgtttttgtttgttttcactagaataatggcaaatacttctaatttttttccctaaacatttttaaaagtgaaatatgggaagagctttacagacattcaccaactattattttcccttgtttatctacttagatatctgtttaatcttactaagaaaactttcgcctcattacattaaaaaggaattttagagattgattgttttaaaaaaaaatacgcacattgtccaatccagtgattttaatcatacagtttgactgggcaaactttacagctgatagtgaatattttgctttatacaggaattgacactgatttggatttgtgcactctaatttttaacttattgatgctctattgtgcagtagcatttcatttaagataaggctcatatagtattacccaactagttggtaatgtgattatgtggtaccttggctttaggttttcattcgcacggaacaccttttggcatgcttaacttcctggtaacaccttcacctgcattggttttctttttcttttttctttctttttttttttttttttttttttgagttgttgtttgtttttagatccacagtacatgagaatccttttttgacaagccttggaaagctgacactgtctctttttcctccctctatacgaaggatgtatttaaatgaatgctggtcagtgggacattttgtcaactatgggtattgggtgcttaactgtctaatattgccatgtgaatgttgtatacgattgtaaggcttatgtcactaaagatttttattctgattttttcataatcaaaggtcatatgatactgtatagacaagctttgtagtgaagtatagtagcaataatttctgtacctgatcaagtttattgcagcctttcttttcctatttcttttttttaagggttagtattaacaaatggcaatgagtagaaaagttaacatgaagattttagaaggagagaacttacaggacacagatttgtgattctttgactgtgacactattggatgtgattctaaaagcttttattgagcattgtcaaatttgtaagcttcatagggatggacatcatatctataatgcccttctatatgtgctaccatagatgtgacatttttgaccttaatatcgtctttgaaaatgttaaattgagaaacctgttaacttacattttatgaattggcacattgtattacttactgcaagagatatttcattttcagcacagtgcaaaagttctttaaaatgcatatgtctttttttctaattccgttttgttttaaagcacattttaaatgtagttttctcatttagtaaaagttgtctaattgatatgaagcctgactgattttttttttccttacagtgagacatttaagcacacattttattcacatagatactatgtccttgacatattgaaatgattcttttctgaaagtattcatgatctgcatatgatgtattaggttaggtcacaaaggttttatctgaggtgatttaaataacttcctgattggagtgtgtaagctgagcgatttctaataaaattttagttgtacacttttagtagtcatagtgaagcaggtctagaaaataagcctttggcagggaaaaagggcaatgttgattaatctcagtattaaaccacattaatctgtatcccattgtctggcttttgtaaattcatccaggtcaagactaagtatgttggttaataggaatccttttttttttttttaaagactaaatgtgaaaaaataatcactacttaagctaattaatattggtcattaaatttaaaggatggaaatttatcatgtttaaaaattattcaagcactcttaaaaccacttaaacagcctccagtcataaaaatgtgttctttacaaatatttgcttggcaacacgacttgaaataaataaaactttgtttcttaggagaaaatgattctgtaattccagtgtcactaatttatattgttctttcctctgatttttttcaggttagtgatttttttgtatacaatttaatccaaatgttatgacattcagaaatcatgaaacacagtagatatctgttataatgtggtgtatcacatggattataaagcaaagttatggtcgatttctattcttgaaagaatcaactacagtgaatcctttgcatttgaagccttaacatgcattgctttaattttgcccagggacaaattttaataatcagcaagactggtttgtgcaaagcgttgagtcatcaggtatttagagcctagccagctacccagtatccatgctgccatatcccttcattgtaaaaagtacctaaacattcgtgaaatgattttttttagctgaaaaatgctggcaagaagaattttaaagcttaaaataggtggtaaatttgaagtatgagtgtgttcacgagaaacataggcttttcaaaaaaatttttattcaaggcaaagcaaggaacatcttgagatatgtctcaagaatataaagatgtattattttaagccaaggagctgaaatatatctcagtttataaattcaggtatattctttttgtctccatggcaaccataacttttgaaccaaaaaaaattgtttttacatctttatgctgaaaatgtgtttagattaggaatatggtcgggctgaatttgctgttgctccctaaccaaatccacctcttgttttccttgtgagtccatggctaaatcaaagctgcccctgagaagagacttaatccaagcctgattgtactagtggcatcacttagaagtaggctttccctcttcctagtagatctcaatgttttataattccttaaaacagctgaaaattgggacaacatactttacgcaatgaacagtagttaaataggaaataaactagttccatataagtatacacctagagttttaattacctttataatgtttcttaaaagtgaaacttagatacaattgtgattggatacttagatactaagtgaaacttagtgtaacaattttgatctgttaaattggattttacatgtacatttgaatgccagaatttctaaataaatcccctggttaggaaattttaaaagtcaaagcttgttttcttcaaccactaccttctacattggttgacttagaccgtaagctttttaagtttctcattgtaatttaccttctcatgcagattgctgatgttttattaaaccttatttttacaaaaatgaaaaaa

SEQ ID NO: 7035 - DNA, 1113 bp, Homo Sapiens
  NM_206901
ccccgagaagcagcggtgtccccagcctctcactcggagccgatatggggagtaaagtggcggacctgctgtactggaaggacacgaggacgtcaggagtggtcttcacaggcctgatggtctccctcctctgcctcctgcactttagcatcgtgtccgtggccgcgcacttggctctgttgctgctctgcggcaccatctctctcagggtttaccgcaaagtgctgcaggccgtgcaccggggggatggagccaaccctttccaggcctacctggatgtggacctcaccctgactcgggagcagacggaacgtttgtcccaccagatcacctcccgcgtggtctcggcggccacgcagctgcggcacttcttcctggtagaagacctcgtggattccctcaagctggccctcctcttctacatcttgaccttcgtgggtgccatcttcaatggtttgactcttctcattctgggagtgattggtctattcaccatccccctgctgtaccggcagcaccaggctcagatcgaccaatatgtggggttggtgaccaatcagttgagccacatcaaagctaagatccgagctaaaatcccagggaccggagccctggcctctgcagcagccgcagtctccggatccaaagccaaagccgaatgagaacggtgtctctgcccgcaggacgcctgcccccagcccccgcagccctctggccccctccatctcttgtccgttcccacccacccccctcctcggcccgagccttttcccggtgggtgtcaggatcactcccactagggactctgcgctaattacctgagcgaccaggactacatttcccaagaggctctgctccaggagtccaggaaagacgaggcaccttggccgcggggcctgctgggacttgtagttgcctagacagggcaccaccctgcacttccggacccgccgctggaggcgccgtgaggcgttggtgtctcctggatgctactagccccaacgccggggctttgcatggggcccaggggaggcctgagcttggatttacactgtaataaagactcctgtggaaaaccaaaaaaaaaaaaaaaaaaaaaaaaaaaaaaaaaaa

SEQ ID NO: 7036 - DNA, 2148 bp, Homo Sapiens
  NM_206902
cgcgcgctgcagtgccttccccacctcggccccgcccgcccccgccgagccgagcaccagggcggcggcggcggcggcggcggcggcggcggctggagcagcccgggaggaggaggcggcgagaatggcagcggcgtcgtgggcgcggcggagatgagcgcccgcgaccccgggcccagggcggcacagccggagtgggcgggggtcccgatgcaggcccgaggggggccatggggcaggtcctgccggtcttcgcccactgcaaagaagctccgtctacagcctcctcaactcctgattccacagaaggagggaacgacgactctgattttcgagagctgcacacagcccgggaattctcagaggaggacgaggaggagaccacgtcgcaggactggggcaccccccgggagctgaccttctcctacatcgcctttgatggtgtagtgggctccgggggccgcagggattcaactgcccgccgcccccgcccccagggccgctcagtctcggaaccacgagaccagcaccctcagcccagcctgggcgacagcttggagagcatccccagcctgagccaatccccggagcctggacgacggggtgatcctgacaccgcgcctccatccgagcgccctctggaagacctgaggcttcggttggaccatctgggctgggtggcccggggaacgggatccggggaggactcttccaccagcagctccaccccgctggaagacgaagaaccccaagaacccaacagattggagacaggagaagctggggaagaactggacctacgactccgacttgctcagccctcatcgcccgaggtcttgactccccagctcagtccgggctctgggacaccccaggccggtactccgtccccatcccgatcgcgagattcgaactctgggcccgaagagccattgctggaagaggaagaaaagcagtgggggccactggagcgagagccagtaaggggacagtgcctcgatagcacggaccaattagaattcacggtggagccacgccttctaggtaagcaacgtgtatgaagatgctgcattggcccacagaaggcaaaagtggcggacctgctgtactggaaggacacgaggacgtcaggagtggtcttcacaggcctgatggtctccctcctctgcctcctgcactttagcatcgtgtccgtggccgcgcacttggctctgttgctgctctgcggcaccatctctctcagggtttaccgcaaagtgctgcaggccgtgcaccggggggatggagccaaccctttccaggcctacctggatgtggacctcaccctgactcgggagcagacggaacgtttgtcccaccagatcacctcccgcgtggtctcggcggccacgcagctgcggcacttcttcctggtagaagacctcgtggattccctcaagctggccctcctcttctacatcttgaccttcgtgggtgccatcttcaatggtttgactcttctcattctgggagtgattggtctattcaccatccccctgctgtaccggcagcaccaggctcagatcgaccaatatgtggggttggtgaccaatcagttgagccacatcaaagctaagatccgagctaaaatcccagggaccggagccctggcctctgcagcagccgcagtctccggatccaaagccaaagccgaatgagaacggtgtctctgcccgcaggacgcctgcccccagcccccgcagccctctggccccctccatctcttgtccgttcccacccacccccctcctcggcccgagccttttcccggtgggtgtcaggatcactcccactagggactctgcgctaattacctgagcgaccaggactacatttcccaagaggctctgctccaggagtccaggaaagacgaggcaccttggccgcggggcctgctgggacttgtagttgcctagacagggcaccaccctgcacttccggacccgccgctggaggcgccgtgaggcgttggtgtctcctggatgctactagccccaacgccggggctttgcatggggcccaggggaggcctgagcttggatttacactgtaataaagactcctgtggaaaaccaaaaaaaaaaaaaaaaaaaaaaaaaaaaaaaaaaa

SEQ ID NO: 7037 - DNA, 5130 bp, Homo Sapiens
  NM_206907
agcgccatgcgcagactcagttcctggagaaagatggcgacagccgagaagcagaaacacgacgggcgggtgaagatcggccactacattctgggtgacacgctgggggtcggcaccttcggcaaagtgaaggttggcaaacatgaattgactgggcataaagtagctgtgaagatactcaatcgacagaagattcggagccttgatgtggtaggaaaaatccgcagagaaattcagaacctcaagcttttcaggcatcctcatataattaaactgtaccaggtcatcagtacaccatctgatattttcatggtgatggaatatgtctcaggaggagagctatttgattatatctgtaagaatggaaggaaatctgatgtacctggagtagtaaaaacaggctccacgaaggagctggatgaaaaagaaagtcggcgtctgttccaacagatcctttctggtgtggattattgtcacaggcatatggtggtccatagagatttgaaacctgaaaatgtcctgcttgatgcacacatgaatgcaaagatagctgattttggtctttcaaacatgatgtcagatggtgaatttttaagaacaagttgtggctcacccaactatgctgcaccagaagtaatttcaggaagattgtatgcaggcccagaggtagatatatggagcagtggggttattctctatgctttattatgtggaacccttccatttgatgatgaccatgtgccaactctttttaagaagatatgtgatgggatcttctatacccctcaatatttaaatccttctgtgattagccttttgaaacatatgctgcaggtggatcccatgaagagggccacaatcaaagatatcagggaacatgaatggtttaaacaggaccttccaaaatatctctttcctgaggatccatcatatagttcaaccatgattgatgatgaagccttaaaagaagtatgtgaaaagtttgagtgctcagaagaggaagttctcagctgtctttacaacagaaatcaccaggatcctttggcagttgcctaccatctcataatagataacaggagaataatgaatgaagccaaagatttctatttggcgacaagcccacctgattcttttcttgatgatcatcacctgactcggccccatcctgaaagagtaccattcttggttgctgaaacaccaagggcacgccatacccttgatgaattaaatccacagaaatccaaacaccaaggtgtaaggaaagcaaaatggcatttaggaattagaagtcaaagtcgaccaaatgatattatggcagaagtatgtagagcaatcaaacaattggattatgaatggaaggttgtaaacccatattatttgcgtgtacgaaggaagaatcctgtgacaagcacttactccaaaatgagtctacagttataccaagtggatagtagaacttatctactggatttccgtagtattgatgatgaaattacagaagccaaatcagggactgctactccacagagatcgggatcagttagcaactatcgatcttgccaaaggagtgattcagatgctgaggctcaaggaaaatcctcagaagtttctcttacctcatctgtgacctcacttgactcttctcctgttgacctaactccaagacctggaagtcacacaatagaattttttgagatgtgtgcaaatctaattaaaattcttgcacaataaacagaaaactttgcttatttcttttgcagcaataagcatgcataataagtcacagccaaatgcttccatttgtaatcaagttatacataattataaccgagggctggcgttttggaatgcaatttgcacagggattggaacatgatttatagttaaaagcctaatatgcagaaatgaattaagatcattttgttgttcattgtgcagtatgtatatagcataatatacacagtgaattataggtctcaggcttacttgatttttggctattttatatttagtgtacacagggctttgaaatattaatttacataaaggccttcatatattattacgtgttatatattacgtgttataaatttattcaataaatatttgcctagaattcccaagacctttataggtgattttgttttctgggctccttaacttcataaatagctagtatcttccagcagtagtaacagtctggataacttcttccatatccctccctctttgtttttttgagacagtgtcactttgtcacccaggctggagtgcaatggtgtggtctcggctcactgcaacctccacctcccgggttcaagtgattctcccgcctcagcttcctgagtagctggaactacaggcgtgtgccaccacacccggctaatttttcgtatttttagtgtagacggggtttcactatgttgcccaggctggtctcgaactcctgaccgcgtgatccaccacctcagcttcccaaagtggtgggattacaggcgtgagccaccgcacccggcctccatatcccccttttaaaattctgtagtgtatggtaagtcatatcagatatcagacctaatttaaatttcattttagctttacaagtccaaaaacacagaatttatatattcagatactctagcactaattttagtcttaaaatattcccacgatattctgtacacaaaatgttctttttgttacaagagctgagttgcatatactgtagataaatcatattatttttgccaatttcacaaattcctctggcccatcatgtcagtcattattgagtatatgcacacattgctacttatttgattatgtatcttttaaattgattcagtgcatagaaaactatctcttacaaactttaagtgctctgatatgacttcccccccaaattttattatgaacatttttaaaaacagaaaaattgaaaaactgtttggtaagcacatgtatatctaccatttagattcagcagttgttaatgttttgtcatttgttttctctatacctatatatgtatagatacagctagttatgcatatatatgcatatatgtgtttgtttgtgtatgtatatatgcttttttccccctgaaccatttggatgttacagacatacttatcaccgtgaaaatacttcaagtatctcctacagataatgacattctcctaaaaatccgtaataccattgtaaaagtaataattccccaatatcatctaatcaagccatatttaaatttctgaagttaactccaaatttctttatagctgattatttcaaactaggatccaattaaagtttacatatgacacttggttataactctttagttggatataacattattattattttgataaaatatggaacaaatcaattctattaataagtggtcacatttgttttgggcttaaattactttttaaagatactggattttcctaagatttctgatttacactgatatttttttttgtcattcttaattgcatcacacaatagatgtaaatgaagatgtagtcacctcagataaaattggtatcgtgtatgataatattgtatcatttatatttgccttatgttaactttaagaaattgatttttttgtattaatcattttcccattgcaacagagctatattttttctattttaagaatcatattttaggattatttttggcaaatacagtgagcacttatgtaaccagatgataatgaactcaaatgtcatgatagcttgcataaatggtgactctagtagatttgactcaagcacttctagaatcatgcactgaattcaaaagaaaaatcttgctgctttttgtccagggcttgttctattcaacttctaatttgaaagctgtacaaagtaatagaagttccatttaaatatgagttcaaaactgtatttactttttatgtggccctctctttaggggattctaattttacttagggtctctaagtgcagcataatgttcctgatgttaacagaagactgtatttttaaagttacaaatttgtatatggaattaagtaatggcgctatatacgctgttgtggggaggggggaagaaaaggaggaaccaattaaataggaccttttaaaaattgttaattttgtaaactttgcttctcttataagttattgtgattcattttagttactgtgttttattttgaaaatatttaaatattgcacttctataaatagtatgataaatgcacagacaattgcagtaaattcttttttaagctaggatatttgaaatgacaacctttggttaagtgtgtcaaggttgcaacagaattttcacaatttttttgttgtttgcaaattgttactaatattgaagaggtaagggaggcaatgcaaatgatttttaatctttttttattatcttttcagcagtttatattttttgtgactttatgcaaccatatttttactttgtcttgacaactgaaagatgtataaggttttttgccagaaatgtactgtatacatagttttaagtataacagattttactgatatgtaaaaattttgccattaaaataaatgatttctcactgagaggaacttttctaccaggttggggcatatgggagcttaatatatcatatctaatttaaaataatttcactgaaataaactccattgcttttacctaatttttttcttgagatgcttttgtagtttttcagagttttagatgattttatacaaaatcctctgcctagcactgctctttttgatgttgtagtgacaccatttacattgaattaatgcttggtagcctggggctagatgtggaactccatggatctgtgttctgactggcacctttggaatgaaagaaaagtgtgtgctgtccaaattttttccccttaattctttccctcatcttctcacccataatagaaattttatttccattgtgagttctgacaagaatgaaattccacatacaacataactgtaaattgttggtaggtagaagttaatatttgtggttcatgtatattttgaccagagtatatttaagtatataatttcagcttccttgatttagaaatatgatataataaagaaaaactccatttatcatctgtta

SEQ ID NO: 7038 - DNA, 1679 bp, Homo Sapiens
  NM_206910
gcgagttattggcaagttcccctgcagttgtttgggctgtcgctgtggctggttctgcggtgtgcggccagccatggagcgctctgggcccagcgaagtgacaggctcagacgcatcgggaccggacccgcagcttgtggtcaccatgggcttcacggggttcggggttcggtaaaaaagctcacacatttgacttggaagcaatgtttgaacaaactcaaagaacagctgtggaaagaagtcacaaaacactgggccaccaggaacacacctgtagcccagcaaagttgaggccatcgactggctcatcacaacaaggaaggctgtgcaccactgggacccagcagcagctcagcagcagcagtgagagggccttgggaaagacttggagggtttggcttatacaagaccagattacagaggggtattgatttgccttgcccccgcccccaccatcacagtgtgtccctgtccagtgttggtgctgtgtggcattgcttgtgtccataggagtccatcaaggcagagcggcagagcggcaagcagagcggcaaggcagttcaacccaatggaaatggattgaaagagtgaaagtcactggtctcaaagaatctacggaatttagcattttgaaaatcacagagcaattttgggtaggtattcacatgcactaaaaaaccaggcaaacatctgactcccaggataaagtgactgagagcagtagaagacttgttgagccttaaggaataagaggaaaattatgttatgaagtgcaggaacagcacagacccagacgaggggatgcagcccggagccagtaacccggcgcctcctcctccccagggcgcagcgctggctgctccccggataccgtgatcacacgtcccaggtcctgagagcgcctcataggtagacagttctttgggacttttgggacgcagcacttgaagagaggtttacctaaactttcctcctgggagcctgtcatcatttgaaagtaacagaagaaagctgtcaggctgaggaaagtttcaacaggcacttggtgagaatgggaagcatccattcattgggaaatcacggggacagaggaggaattcacgggatcagagcactgagaaactccagaggcttctggttcaccgccctgattccacagatgtgggtcagaggcagagatggaagttggaatggacaagcctgccctctcctcagctctccatggctctgtcctcaggctgtttctgcaatttgacatgaggcctggccccagggaaaccagtggggcctcatctcctccctgtgctgctctgaggtggagccttctcagggtcagtccagctctggagcccctctccagctcggtcaccaaagctgtctggtcccagggcagtgtggagtgacaggcacgccagccaatccaatcggccatttcatacccaatgcatgtgactgataaagagataacaccctgtctccaagacacaggctttacataaacagctttaatgacttcttcacttagggacaagactccttagtggtggaacctcaggcatccatgcaggatgtaagaaagctcccgtatatacatgaactgagaagtgtgtagaagagtaaatactgtaataggtaataaaatgtatgtatttttatttaaaaaaaaaaaaaaaaaaaaa

SEQ ID NO: 7039 - DNA, 4759 bp, Homo Sapiens
  NM_206928
ctaaaagaaagaatggatgaacccaatgcagaacaggtctataatccctctcagtttgagaatttgagaaagttttgggacttagaagctaattcaaacagtaaggataatgacaagaatattaccaccacaagccaaaaaaattctgcaccttttaataggcagaaacacaaggaattcagcgacattaaattatcaggtaaaaatacccatgaagcagaggtgcttctaagcccaaaaaaagttatggcaagagaggaaatggagaaattaaattcaaagggcatactccaggtgctaccagatgaaatcacatttcctttgagtccacttagaaagtatacttatcagttgccaggaaatgagtcatcaaaggaaaatgtggaaaagaatacggaagggattgttactccagtgtttaaggaagaaaaggattactcagaacaagagattcaagaatccataataaaaaccaatgttttgtctaaagactgcaaagacacttttaatgacagcttgcagaaactgctttcagaaacctcaacaccagcaattcaaccctctggtggaaaagttcatggaaaacaagtgcttgaaccaagtgtttctgaaaataggacatggcctcaaaaaacagattttgctgatactgaggaagaagtcaaaggacctgagaagatcattaatgagcatgttgacaaaacagtagttcatccaaaggttaaacggaactctttgactgctagtctagacaaactcctgaaggaagcaactggaacttcaccctctcccttgcaagccaagttggcgcctgttatcactggaaccaactctaagctggaagaggggagattttttggaaaagggatagaacagagtcacaatacttcagctgataagagagaaatactagctccttttccagtgagagatgaaacttttggaaatacagctctcctcaagaaagctgaaagtggtgagtgccagctaagcacacagaatttgattcagatggctgcagaagattctcatccattggatccaacttcccagctttccagaaagggttcttttggggatgtggccagccctccccaagatatgctttttccccaggatgctcatcttgttccccaggctagggtacacccttctcaaacggaaatttcggagactgtagagaaagtcattcttccacccagacctgtattgaatgatgtaagtgctgcattacagaagctgtgtggagaagtatggttaagttatccagctggaagggaagtaggtcctggagaagtgaacccagaatttcctgaagcagtacagccagtatgtagccccctaaatcctccaggagtgatatcaccatgggctacgatggacaccatagttccagacaggaaggatttttattcctccaatgtagttcctgataaaactcatgaagttggatcttatttagctgcccaaatgtctccatcagaccagacgcttagctcatttgcttccattgttgctcaatatggcaaaggcctccctcaggaagtggaagaaattgtgagggaaacaattgttcaacccaaatcagagttcctcgaattcagtgctggcttagaaaaactactgaaggaagaaactgaaaccttcccctcaaaatatgaaagtgatacagggaatctttctccatcaaagttaataggtagtacagaggagcccaggcgagccacttctgaatgccatcctgaggaattaaaagaaacagtagaaaaggccgaggctccgttaataactgagagtgcttttgatgctggttttgagaaacttcttaaagaaataactgaagctcctccttatcagccccaggtgtcagtgagagaagaaactcacgagaaggagtcctcacagtcagagcagaccaggttcttggggacagtgccccatttttacagggcagcctcacagacctctgaaatgaaggataaaagtaatggtttggaatctcaagtcaaccaatgtgataaaatgttgggaggagacgcacttgtgactgatttattggtagatttttgtggttccagaagtggagttgagatccctagaaccccacaactttatgtggctcatgaaatagggaccattaaaactgtaacccccccagaggacagggacagtgaaagtggggttgcagggggacaagggactcttcaggaacctggctttggagaggcttctgaagcaattagtgtgtccagaaataggcaacccattcctctcctgatgaacaaagaaaactctacaaaaacaagtaaagttgaattgactctagcatcgccatatatgaaacaagagaaagaggaagaaaaagaaggtttctctgagtctgatttttcagatggaaacaccagttctaatgcagagagctggagaaatccttccagttcagaagaagaacccagtcctgttttgaaaactttggaaaggagtgccgctaggaaaatgccttccaaaagtctagaagacatttcatcagattcatcaaatcaagcaaaagtagataatcagccagaagaattagtgcgtagtgctgaagatgtttccacagtgcctacacaacctgataatccattttctcaccctgacaaactcaaaaggatgagcaagtctgttccagcatttctccaagatgagagtgatgacagagaaacagatacagcatcagaaagcagttaccagctcagcagacacaagaagagcccgagctctttaaccaatcttagcagctcctctggcatgacgtccttgtcttctgtgagtggcagtgtgatgagtgtttatagtggagactttggcaatctggaagttaaaggaaatattcagtttgcaattgaatatgtggagtcactgaaggagttgcatgtttttgtggcccagtgtaaggacttagcagcagcggatgtaaaaaaacagcgttcagacccatatgtaaaggcctatttgctaccagacaaaggcaaaatgggcaagaagaaaacactcgtagtgaagaaaaccttgaatcctgtgtataacgaaatactgcggtataaaattgaaaaacaaatcttaaagacacagaaattgaacctgtccatttggcatcgggatacatttaagcgcaatagtttcctaggggaggtggaacttgatttggaaacatgggactgggataacaaacagaataaacaattgagatggtaccctctgaagcggaagacagcaccagttgcccttgaagcagaaaacagaggtgaaatgaaactagctctccagtatgtcccagagccagtccctggtaaaaagcttcctacaactggagaagtgcacatctgggtgaaggaatgccttgatctaccactgctaaggggaagtcatctaaattcttttgttaaatgtaccatccttccagatacaagtaggaaaagtcgccagaagacaagagctgtagggaaaaccaccaaccctatcttcaaccacactatggtgtatgatgggttcaggcctgaagatctgatggaagcctgtgtagagcttactgtctgggaccattacaaattaaccaaccaatttttgggaggtcttcgtattggctttggaacaggtaaaagttatgggactgaagtggactggatggactctacttcagaggaagttgctctctgggagaagatggtaaactcccccaatacttggattgaagcaacactgcctctcagaatgcttttgattgccaagatttccaaatgagcccaaattccactggctcctccactgaaaactactaaaccggtggaatctgatcttgaaaatctgagtaggtggacaaatatcctcactttctatctattgcacctaaggaatactacacagcatgtaaaagtcaatctgcatgtgcttctttgattacaaggcccaagggatttaaatataacaaaatgtgtaatttgtgactctaatattaaataagatatttgaacaagctaggaaaattgaatttctgctgctgcttcaaagaaaaagctgccccagagcattaaacatggggtattgttaagaagcaaaatgttcttgtttgccatcatgtgtttcacaccacaattctgtgccacagttaagagggtctggtacccttgcaggacctttgtaggttgtgggaaaaagtcgcagaaagatactcaaagtggagcagggaatggagacagacatcagtgatgataaaaaaaaaaatggaccttaagaaactatttactctgtaatctctaataaaatatggaattccatattagggcaatgagactgaaactactggtgtttttctgccttgagaaaacaaacagttaaaacaagcctcaaatgtattttagtgccacccactggccataggtacaattcagttgttggcttgttttgacttaattctaaaataggtctcaagcctgtatttttatgagtttatttttttaaaaccctgcatatatatgattgtttttcttataactttactatatgaaagcagcataagagtagtcacaaacatgttttgcaacaaagttttaattagaatgtaagttgctcagttatactgttcttcttatgtatgtaaaattttcgtattttgtaaaaacccttagaataaattatcatttgatttaaattgtattagaaaattagcgtgacttctcattttaaataaaatattttaggaattctaaacatctaaaaa

SEQ ID NO: 7040 - DNA, 2432 bp, Homo Sapiens
  NM_206929
ggctgttgcagccccgtgctttctcctgctgctggccgattgcttgctctgaactaaccctctaacccttgggagtctgtgtgcagcagtgatgtgagctgcatccgggctgaaatgggagctcccgctatggcactggctcaaggagctaatctaaagagaaaatcaagcaaaagtagataatcagccagaagaattagtgcgtagtgctgaagatgatgagaaaccagatcagaagccagttacaaatgaatgcgtaccaagaatttccacagtgcctacacaacctgataatccattttctcaccctgacaaactcaaaaggatgagcaagtctgttccagcatttctccaagatgagagtgatgacagagaaacagatacagcatcagaaagcagttaccagctcagcagacacaagaagagcccgagctctttaaccaatcttagcagctcctctggcatgacgtccttgtcttctgtgagtggcagtgtgatgagtgtttatagtggagactttggcaatctggaagttaaaggaaatattcagtttgcaattgaatatgtggagtcactgaaggagttgcatgtttttgtggcccagtgtaaggacttagcagcagcggatgtaaaaaaacagcgttcagacccatatgtaaaggcctatttgctaccagacaaaggcaaaatgggcaagaagaaaacactcgtagtgaagaaaaccttgaatcctgtgtataacgaaatactgcggtataaaattgaaaaacaaatcttaaagacacagaaattgaacctgtccatttggcatcgggatacatttaagcgcaatagtttcctaggggaggtggaacttgatttggaaacatgggactgggataacaaacagaataaacaattgagatggtaccctctgaagcggaagacagcaccagttgcccttgaagcagaaaacagaggtgaaatgaaactagctctccagtatgtcccagagccagtccctggtaaaaagcttcctacaactggagaagtgcacatctgggtgaaggaatgccttgatctaccactgctaaggggaagtcatctaaattcttttgttaaatgtaccatccttccagatacaagtaggaaaagtcgccagaagacaagagctgtagggaaaaccaccaaccctatcttcaaccacactatggtgtatgatgggttcaggcctgaagatctgatggaagcctgtgtagagcttactgtctgggaccattacaaattaaccaaccaatttttgggaggtcttcgtattggctttggaacaggtaaaagttatgggactgaagtggactggatggactctacttcagaggaagttgctctctgggagaagatggtaaactcccccaatacttggattgaagcaacactgcctctcagaatgcttttgattgccaagatttccaaatgagcccaaattccactggctcctccactgaaaactactaaaccggtggaatctgatcttgaaaatctgagtaggtggacaaatatcctcactttctatctattgcacctaaggaatactacacagcatgtaaaagtcaatctgcatgtgcttctttgattacaaggcccaagggatttaaatataacaaaatgtgtaatttgtgactctaatattaaataagatatttgaacaagctaggaaaattgaatttctgctgctgcttcaaagaaaaagctgccccagagcattaaacatggggtattgttaagaagcaaaatgttcttgtttgccatcatgtgtttcacaccacaattctgtgccacagttaagagggtctggtacccttgcaggacctttgtaggttgtgggaaaaagtcgcagaaagatactcaaagtggagcagggaatggagacagacatcagtgatgataaaaaaaaaaatggaccttaagaaactatttactctgtaatctctaataaaatatggaattccatattagggcaatgagactgaaactactggtgtttttctgccttgagaaaacaaacagttaaaacaagcctcaaatgtattttagtgccacccactggccataggtacaattcagttgttggcttgttttgacttaattctaaaataggtctcaagcctgtatttttatgagtttatttttttaaaaccctgcatatatatgattgtttttcttataactttactatatgaaagcagcataagagtagtcacaaacatgttttgcaacaaagttttaattagaatgtaagttgctcagttatactgttcttcttatgtatgtaaaattttcgtattttgtaaaaacccttagaataaattatcatttgatttaaattgtattagaaaattagcgtgacttctcattttaaataaaatattttaggaattctaaacatctaaaaa

SEQ ID NO: 7041 - DNA, 2889 bp, Homo Sapiens
  NM_206938
attcacatcctgtgtaatcataaatactgctctaagaaagggacaggaagtctcagaggctggagagcagagcaccaagatcgttctggcaggaacagccagtgggaggttccagctgagcgctccccagaggtgagctgatccccagccacagcacacaggaccaggctgcgagaacagcatcatcagcatcatgctattacaatcccaaaccatgggggtttctcacagctttacaccaaagggcatcactatccctcaaagagagaaacctggacacatgtaccaaaacgaagattacctgcagaacgggctgccaacagaaaccaccgttcttgggtttggcattactggatccctctcaattatctctggaaaacaatcaactaagccctttgacctgagcagcttgacctcaaatgcagtgagttctgttactgcaggagcaggcctcttcctccttgctgacagcatggtagccctgaggactgcctctcaacattgtggctcagaaatggattatctatcctcattgccttattcggagtactattatccaatatatgaaatcaaagattgtctcctgaccagtgtcagtttaacaggtgtcctagtggtgatgctcatcttcactgtgctggagctcttattagctgcatacagttctgtcttttggtggaaacagctctactccaacaaccctgggagttcattttcctcgacccagtcacaagatcatatccaacaggtcaaaaagagttcttcacggtcttggatataagtaactcttggcctcagaggaaggaaaagcaactcaacactcatggtcaagtgtgattagactttcctgaaatctctgccattttagatactgtgaaacaaactaaaaaaaaaaaagcttttgttttgtatttgtttactatgagtcgttatttaatttctcttgaaaataatttcctcaaagcccaagtcaataaatgttatcagccagtcttccaaaatggtcataaactttataaactgctttgggtaaactgagcagaaggtgatacacagaagggaaaatgtgcactcatgctagtgtgaatttggtaagttgcgtgactctgcaggctgtttctgtattattttcacactcatattgcttaaatattacatattagggattgtaagaaaactttaattaaaaattaaagactatatataattaaactactctgccctggacactctctgagaaacagatctactgggccctttttcatgagccattaggtggaagacagcaaagagatcttctcaagtgcttaggattacctctcaacacacagcaagcatgtccctgcctcccatgaatcttaccatgtaaatccaaatctctgcaatcctgtggcaccaaccagtggtgctcattctattgtttaaaaatggccttcttggctgggcgcggtggctcactcctgtaatcccagcactttggtaggccgaggtggacggatcacccgaggtcaggagtttgagaccagcctggccaacaaggtgaaaccctgtctctactaaaaatacaaaaaattagccaggcatggtggtgcgcacctgtagttccagctacttgggaggctgaggcagaagaatcacttgaacccgggaaggggaggttgcagtgagcggagactgcaccactgcattccagcccggcctacaagaacaaaactccatctcaaaataaataaaaaaataaataaaaataaaaatagactatatatagtctttgaattcatttattttaaataaatgaataaaataaaataaaaaagaatattcagtcgttggcacataaactatgttctcttctgtcatttcagggtaggagtcaatgaagacatcttagtcttaacaagttacagataatctctgactggcatgttttctgcttctagcttggagctaaatgctgctcatgctgaaaagaataatgtctatttctttgtttgggtattagctctattttgatctatagcacagttttgtaattcagatcatcacccctgcactttgtaccacatgggcgtattctttcttcccagtcattgctgcaattatcttgtctgttctttgtgtaatatgttctgtgtgagcctctgcattaaactcgatttcttgggcaattatggaaattccagtgtggctgcagtttaactttgcactctctatgcatatgaggtttcctaaataaatgaggagtagcatagtttaaaatatatatatcttataactttctacaacaaagaattattgagtccaaatgtcatcagtgctcattttgagataccctgctatcgatggtcgctacaaaccaggaaatactcaagttattatgtgtatacattggttttagttttatgaaacaatttaccttcatgatctcatagttaaaattgtaataaatttaggaatataaaggatcaatatgggaagcaaaatttctaaaggcagtttctgttgttttaattagtatttgtgtagttcaaaccaggaaggatttgactatcattagattttgcttaactttatgaaagctaaaatattctctgttataaaggggcaactccatctggtcctatagcatctttactactgatttttttttgtttaatttgaaaatgcaaagaattgttaaatgttcttaaatgttctcactacaaaaaaagaaaaaagataactacgtgaggtgatggatatgttaattagctggattgtggtaatcattttggaatgtatatgtatatcaaaacatgtagtacaccctaaatatatataatttttatttgtcaaatatacctcaataaagatggaaaaaaatcgaaattcaaaaaaaaaaaaaaaaaa

SEQ ID NO: 7042 - DNA, 2960 bp, Homo Sapiens
  NM_206961
ggggtctgaggtgggcgtggccagaccagctttaggtccggggagtgtctcgccagcggcagcacacccctgtaagtggtggccagggctgccgtggcaaaatgagctgtcaactttaggttgacaggggtgtggccgcgaccgcaagggcttttgttgccgggtggacccaacagggatgggctgctggggacagctgctggtgtggttcggagccgcgggcgccattctctgctctagcccggggtcccaggagacttttctgcggtcctcgcccctgccgctggcaagtcccagcccccgggacccgaaagtcagcgccccgcctagtatcttggagccagcctccccgctgaattctccgggcaccgaggggtcttggctgttttctacctgcggggccagcggccggcatgggcccacacagacacaatgtgacggggcgtacgcggggaccagcgtggtggtgaccgtgggggccgccgggcagctgagaggcgtgcagctgtggcgcgtgccgggccctggccagtatctgatctcagcctacggagccgcgggcggcaaaggcgccaagaaccacctgtcgcgggcgcatggcgtcttcgtctcagcaatcttctccctcggtctcggggagtcgctgtacatcctggtggggcagcagggagaggacgcctgtcccggaggtagcccggagagccagctcgtctgcctcggggagtctcgagccgttgaagagcacgcggcgatggatgggagcgaaggggtcccggggtcgcggcgctgggcgggaggtggcgggggtggcgggggcgccacctacgttttccgggtgcgcgctggcgagctggaaccgttgctggtggcggccggaggcggcggtcgggcctacctgaggccgcgggaccgaggccggactcaggcctcccccgagaaactggagaaccgctcggaggcgcccgggagcggcgggagaggcggggcggcagggggcgacgcttcagagactgacaacctctgggctgatggggaagatggagtatccttcatacaccccagcagcgagctcttcctgcagcctctggcagtcaccgagaaccacggagaggtagagatccgaaggcacctcaactgcagtcactgccctttgagagactgccaatggcaggcagagctccagctggctgaatgcctgtgcccagaaggcatggagctagctgtggataacgtcacctgcatggacctgcacaagcccccaggccctctggttctgatggtggctgtggtggcaacctcaacactgagcctccttatggtgtgtggggtcctgattctggtgaagcagaagaagtggcagggcctgcaggagatgaggctgccgagccctgagcttgagctgagcaagcttcgaacctctgccatcaggacagcccccaatccctattattgccaggtggggcttggcccggcccagtcctggcctctgccaccaggtgtcaccgaggtttccccagccaatgttactctgctcagagccctgggccatggtgcctttggggaggtgtatgagggactggtaattggccttcctggggactccagtcccctgcaggtagctatcaagaccctgccagaactctgctcgcctcaggatgagctggatttcctcatggaggccctcatcatcagcaagtttcgccatcagaacattgtgcggtgtgtggggctcagcctcagggccacccctcgcctcattctgctggaactgatgtctggaggggacatgaagagtttcctgaggcacagtcggccacacctgggccagccatcacctctggtcatgcgggacctgctgcaactggcccaggacatagcccagggctgccactacctggaggaaaatcacttcatccacagggatattgccgcccggaactgcctgctgagctgcgctggacccagccgagtggccaagattggggactttgggatggcacgagatatctaccgggccagttattaccgcaggggggaccgggccttgctcccagtcaagtggatgcccccagaggccttcctggagggcatcttcacatccaagacagattcctggtcttttggggtgctgctctgggagatcttctcactgggctacatgccctatcctgggcgcaccaaccaggaggtgctggacttcgtcgttggaggaggccggatggaccctcctaggggctgcccagggcctgtgtaccgcatcatgacccagtgttggcagcacgagcctgagctccgccctagctttgccagcatcttggagcgtctgcagtactgcactcaggacccggatgtgctgaattcactcctgccaatggagctggggcccaccccagaggaggaagggacttctgggctggggaacagatctttggagtgcctaagacccccacagccccaggaactgagtccagagaagttgaaaagctggggaggtagccctcttggcccctggctgtcctctggcctcaagcccctcaaatccaggggcctccaacctcagaacctttggaatcccacttatcgctcctgagccccaaggggccctgagggtaaggactgaggcactgagggtccctccctatactcctcaggctcctgggtggcctgttatgccagcggcctctgttccctgcagtctgtgctgtgtgtctgggcctgtctcggggctggcctggcagcgctgcacttgccatgctggaaaccagcccaggcctcccagggaagggcccagccacttccagcttttgatcttggggccagaggccgccttacacacaccccaggtgtccatggggagcactggattgctctcccattatgagcatccttcatctgggcagaccccccaccctgcagatgcttctaataaaaagctcttctcatcaaaaaaaaaaaaaaaa

SEQ ID NO: 7043 - DNA, 2249 bp, Homo Sapiens
  NM_206962
cgggccctgggcggggccttcccggctgacggcctgcgtgcactgcgcttgcgcgggttgagggcggtggctcaggctcctggaaaggaccgtccacccctccgcgctggcggtgtggacgcggaactcagcggagaaacgcgattgagagcagtgtgtggattacactatcactggaaaaatacgaattgagaagaaggaaaagactggaagatgcagaccttggttcctgttagtggaaacactgtaaggtcccagaaatggaaaagaaaatgaaataaatcagcagttatgaggcagagcctaagagaactatggcaacatcaggtgactgtcccagaagtgaatcgcagggagaagagcctgctgagtgcagtgaggccggtctcctgcaggagggagtacagccagaggagtttgtggccatcgcggactacgctgccaccgatgagacccagctcagttttttgagaggagaaaaaattcttatcctgagacaaaccactgcagattggtggtggggtgagcgtgcgggctgctgtgggtacattccggcaaaccatgtggggaagcacgtggatgagtacgaccccgaggacacgtggcaggatgaagagtacttcggcagctatggaactctgaaactccacttggagatgttggcagaccagccacgaacaactaaataccacagtgtcatcctgcagaataaagaatccctgacggataaagtcatcctggacgtgggctgtgggactgggatcatcagtctcttctgtgcacactatgcgcggcctagagcggtgtacgcggtggaggccagtgagatggcacagcacacggggcagctggtcctgcagaacggctttgctgacatcatcaccgtgtaccagcagaaggtggaggatgtggtgctgcccgagaaggtggacgtgctggtgtctgagtggatggggacctgcctgctgtttgagttcatgatcgagtccatcctgtatgcccgggatgcctggctgaaggaggacggggtcatttggcccaccatggctgcgttgcaccttgtgccctgcagtgctgataaggattatcgtagcaaggtgctcttctgggacaacgcgtacgagttcaacctcagcgctctgaaatctttagcagttaaggagtttttttcaaagcccaagtataaccacattttgaaaccagaagactgtctctctgaaccgtgcactatattgcagttggacatgagaaccgtgcaaatttctgatctagagaccctgaggggcgagctgcgcttcgacatcaggaaggcggggaccctgcacggcttcacggcctggtttagcgtccacttccagagcctgcaggaggggcagccgccgcaggtgctcagcaccgggcccttccaccccaccacacactggaagcagacgctgttcatgatggacgacccagtccctgtccatacaggagacgtggtcacgggttcagttgtgttgcagagaaacccagtgtggagaaggcacatgtctgtggctctgagctgggctgtcacttccagacaagaccccacatctcaaaaagttggagaaaaagtcttccccatctggagatgacagttgatgctttatttggaaagcagtgtgcatatcttgaggggtgatgaacacaagcaaaccaagttgcacctggcttctgcacactcctgcgaaagtcggtgaacattcactccacattgacccctccctagcctggcaggtgacgtcagggtccttcacagacaaacacgcttgggctcggcaggagctgccgtggccacccccgctgcccagtgtctgccctctagaagtaggctgtgtttccaggtgttcacccgtggtgcccacagtgccgacccgtggctgggtcggagctccatgttcctaagctaggtctaggtctacactcctaggacgcacgcatatcagcccgtgtaccctgtgacagtgactgtccccacctcctatgttagtggtgcccttactgccgtcgctcatccactcgtgtgggacgtaggattgcacagggctgtgccagtggcgtgtagggaacactgccctggctcagcgtgcgagctaaggtggtgatgtatgcgatgggactctgcatgggatagtacagttgtgtagacgtcttccaaataaattatgtgttggtccatcgcacatgctcaataaatatttttaaatgagtgaatgtcaaaaaaaaaa

SEQ ID NO: 7044 - DNA, 899 bp, Homo Sapiens
  NM_206967
cccgagcgccggccgggccatgacccccgctgctctgtcttgcaggctcgtcgccgcggccccccgagcccgaccgccgccgccaccaccaccagcgcccgggcgggcctcgcgcgcctcgggcgcggctccgcagtgagcccaccaagaaggaagcggcctgcagaggtgccgacatggggcttaagatgtcctgcctgaaaggctttcaaatgtgtgtcagcagcagcagcagcagccacgacgaggcccccgtcctgaacgacaagcacctggacgtgcccgacatcatcatcacgccccccacccccacgggcatgatgctgccgagggacttggggagcacagtctggctggatgagacagggtcgtgcccagatgatggagaaatcgacccagaagcctgaggaggtgtcctgggtttggctggctggctcctgctccagcggcccggcttcaggtgtccgggggcgtggctgcctggagcaggtgtgctgaataccctggatgggaactgagcgaacccgggcctccgctcagagagacgtggcaggaccagcgaggaatccagcctgtccacttccagaacagtgtttcccaggccccgctgagtggaccggacctctgacacctccaggttcttgctgactccggcctggtgaaagggagcgccatggtcctggctgttggggtcccagggagaggctctcttctggacaaacacaccctcccagcccccagggctgtgcaaacacatgcccctgccataagcaccaacaagaacttcttgcaggtggagtggctgttttttataagttgttttacagatacggaaacagtccaaaatgggatttataatttcttttttgcattataaataaagatcctctgtaacaaaa

SEQ ID NO: 7045 - DNA, 5019 bp, Homo Sapiens
  NM_206999
gcgacctccggcgccattttgtagagaaacaagcggagttaaccgaagagggggtcgaggagagccggagtcggggacccaggagtttcctgtgtccagcgctgccggagccgcctgaggtgccatgtttcagaacagagtaagacccctggtaaagaagaactgaagatattatacagataccagatatagcctaattacaaagaaagcattaacctgcctctgaggtgactaaaggggaataatggtgattttgcgccgggctcggccgcctgcttccgccccaaccagcaatgaatcttgactcgctctcgctggccttgtctcaaatcagctacctggtggacaatttaaccaagaaaaattaccgagccagccagcaggaaatacagcatattgtgaatcggcacggtcctgaggcagacaggcatttattacgctgcctattttcgcatgtggatttcagtggcgatggtaaaagcagtggcaaagatttccatcagactcagtttctgattcaggagtgtgcgttgctgattacaaagccaaattttatctcgacgctgtcctatgccattgataatccattgcactatcagaagagtttaaagcctgcaccccacttatttgcccagctgagtaaagtgctcaaattaagcaaagtacaagaggtaatttttggccttgccctgttgaattcttccagctcagatcttagaggtttcgctgcccagtttatcaaacagaagcttccagatcttctgcgttcttacattgacgcagacgtcagtggaaatcaagaaggtggcttccaagatatagcaatagaggtcctacacctcctcctctcccatctcctctttgggcagaagggagcctttggagttggacaagaacagatagacgcttttcttaagacgctgcgcagagattttccccaagaacgctgtcccgtggtgctcgcaccacttttataccctgaaaaacgggacattctaatggacaggatcctgcctgattccggaggggtagctaaaaccatgatggagagctctttggctgatttcatgcaagaagtaggctatggcttttgtgcaagtattgaagaatgtcgcaatataatcgtgcagtttggtgttcgggaggtcacagctgcccaggttgcaagggttttgggaatgatggctcgaactcattcaggattaacagatggcattccattacagagtatttctgctccgggcagtgggatctggagtgatgggaaagataaaagtgatggagcacaggcacacacatggaatgtagaagtcttgattgacgttcttaaagaactgaatccaagtttgaatttcaaggaagtaacttatgaactggaccatcctggatttcaaattcgtgacagtaaaggacttcataatgtggtttatggcattcagaggggtttgggtatggaagtgttcccagtagacctcatatatagaccttggaaacatgctgaaggccagctctccttcattcaacattcccttataaatccagagatcttctgttttgctgactatccctgtcatactgttgccactgatattctgaaagcaccaccagaggatgacaatcgagaaattgccacatggaagagcttggatttgattgaatctctgctgaggcttgcagaggttgggcagtatgagcaagtcaaacagctcttcagcttccctatcaaacactgtccagacatgctggtattggccttactacaaattaacacctcttggcataccttgcgccatgaacttatctccactctgatgccaattttccttggaaaccatcctaactcagctattattttgcactatgcatggcatgggcagggacagtctccctcaattcgccaacttatcatgcatgcaatggcagaatggtacatgagaggggagcagtatgatcaggccaaattgtctcgaatacttgatgtggcccaggacttgaaggccttgtcaatgctgctaaatggtactccatttgcctttgttattgaccttgctgcacttgcttcacgtcgtgaatacctcaaacttgataagtggctcacagataaaattcgagagcatggggagccttttatccaggcgtgtatgacttttttaaagagacggtgtccttctattttgggcggacttgccccagaaaaagaccagcccaaaagtgctcaacttcctccagaaactttggcgacaatgttggcctgtctgcaagcttgtgcagggagtgtttctcaggagctatcagaaactatcctcaccatggtagccaattgcagtaatgttatgaataaggccagacaaccaccacctggagttatgccaaaaggacgtcctcctagtgctagcagcttagatgccatttctcctgttcagattgaccctcttgctggaatgacatctcttagtataggtggttcagctgcccctcacacccagagtatgcagggttttcctccaaatttgggttctgcattcagtacccctcagtcaccagcaaaagcatttccacccctttcaacccccaatcagaccactgcattcagtggtattggaggactttcatcacagcttccagtaggtggtcttggcacaggcagcctgactggtataggaactggtgctcttggactccctgcagtgaataacgacccttttgtacagaggaaactgggcacctctggactgaatcagcctacattccagcagagtaagatgaaaccttcggacttgtctcaggtgtggccagaggcaaaccagcactttagtaaagagatagatgatgaagcaaacagctatttccagcgaatatataatcatccaccacatccaaccatgtctgttgatgaggtattagaaatgctgcagagatttaaagactctactataaagagggaacgagaagtatttaactgtatgctaaggaacttgtttgaagaatatcgtttttttccccagtatcctgataaagagttacatataacagcctgcctatttggtggtataattgagaaaggactggtcacttacatggcactaggtctggctctacgatatgttcttgaagccttacgcaagccttttggatccaaaatgtattatttcgggattgctgcactagatagatttaaaaacagattgaaggactatccccagtattgtcagcatttggcttctatcagtcactttatgcaatttccacatcatttacaggagtatattgagtatggacagcagtctagagatcctcctgtgaaaatgcaaggctctatcacaacccctggaagtattgcactggctcaggcccaggctcaggcccaggttccagcaaaagctcctcttgctggtcaagttagcactatggtaaccacctcaacaactaccactgttgctaaaacggttacggtcaccaggccaactggagtcagctttaagaaagatgtgccaccttctattaatactacaaatatagatacgttgcttgtggccacagatcaaactgagagaattgtggagcccccagaaaatatccaggagaaaattgcttttattttcaataatctctcacagtcaaatatgacacaaaaggttgaagagctaaaggaaacggtgaaagaagaatttatgccttgggtttcacagtatctggttatgaagagagtcagtattgagccaaactttcatagcctgtattcaaacttccttgacacgctgaagaatcctgaatttaacaagatggttctgaatgagacctacagaaacattaaagtgctcctgacctctgataaagctgcagccaatttctcagatcgttctttgctgaagaacttgggacattggctaggaatgatcacattagctaaaaacaaacccatcttacacactgacttggatgtgaaatcattgctgctagaggcttatgttaaaggacaacaagaattgctctatgtagtgccctttgttgccaaagtcttagaatctagcattcgtagtgtggtttttaggccaccaaacccttggacaatggcaattatgaatgtattagctgagctacatcaggagcatgacttaaagttaaacttgaagtttgaaatcgaggttctctgcaagaaccttgcattagacatcaatgagctaaaacctggaaacctcctaaaggataaagatcgcctgaagaatttagatgagcaactctctgctccaaagaaagatgtcaagcagccagaagaactccctcccatcacaaccacaacaacttctactacaccagctaccaacaccacttgtacagccacggttccaccacagccacagtacagctaccacgacatcaatgtctattcccttgcgggcttggcaccacacattactctgaatccaacaattcccttgtttcaggcccatccacagttgaagcagtgtgtgcgtcaggcaattgaacgggctgtccaggagctggtccatcctgtggtggatcgatcaattaagattgccatgactacttgtgagcaaatagtcaggaaggattttgccctggattcggaggaatctcgaatgcgaatagcagctcatcacatgatgcgtaacttgacagctggaatggctatgattacatgcagggaacctttgctcatgagcatatctaccaacttaaaaaacagttttgcctcagcccttcgtgtaagttggctatttccttggtataggtacaaaacgtattactgcttgtctgtaataatttttttctttgtctatatatggcactgggcgttaccacttattcttaataatcaccatatttgtttgatgtcttccatcattttagattgtaattctgtgaggcaaagcatcatgtctgtgtgtttttttttttttctgttatattctcaacacgatgtttgacagatagtagatacccaaatatttgttggtttaaataaattaagatttaaaaaggaaaaaaaaaaaaaaa

SEQ ID NO: 7046 - DNA, 685 bp, Homo Sapiens
  NM_207007
acaggacacagctaggttctgaagcttctgagttctgcagcctcacctctgagaaaacctctttgccaccaataccatgaagctctgcgtgactgtcctgtctctcctcgtgctagtagctgccttctgctctctagcactctcagcaccaatgggctcagaccctcccaccgcctgctgcttttcttacaccgcgaggaagcttcctcgcaactttgtggtagattactatgagaccagcagcctctgctcccagccagctgtggtattccaaaccaaaagaggcaagcaagtctgcgctgaccccagtgagtcctgggtccaggagtacgtgtatgacctggaactgaactgagctgctcagagacaggaagtcttcagggaaggtcacctgagcctggatgcttctccatgagccgcatctcctccatactcaggactcctctccgcagttcctgtctcttctcttaatgtaatctcttttatgtgctgtattattgtattaggtgttatttccattatttatattagtttagccaaaggataagtgtcccctatggggatggtccactctcactctttctctgctgttgcaaatacatggataacaccgttaattccatgtgttttcataataaaactttaaaataaaatgcaaaaaaaaaaaaaaaaaaaaaaaaaaaaa

SEQ ID NO: 7047 - DNA, 4806 bp, Homo Sapiens
  NM_207037
tccggaggcgagccgagcgcggtggtgaggccgcctcagcgaaaaaaatgtccgcctgaagagacccacaagttctattcggggggaccgacagcccgccccgggaggaaggggcggccaggcccgaaagccgcctccccctcccagacccgagagctcgtgcggggcaaagtgaaccgagccgctgggcggtgcaaggggaagcccaagcccgttctcccggccaaagtgaactttaatcggggtggttggatgcggagacggggcggcaggacctgctagaagtggccgaagatgaatccccagcaacaacgcatggccgctatagggaccgacaaggagctgagcgacctactggacttcagtgcgatgttttccccacctgttaatagtgggaaaactagaccaactacactgggaagcagtcaattcagtggatcaggtattgatgaaagaggaggtacaacatcttggggaacaagtggtcaaccaagtccttcctatgattcatctagaggttttacagacagccctcattacagtgatcacttgaatgacagtcgattaggagcccatgaaggcttgtccccaacacctttcatgaactcaaatctgatgggaaaaacatcagagagaggctcattttccctgtacagcagagatactggattaccaggctgtcaatctagtctcctgagacaagatctggggcttgggagcccagcacagctatcttcttcaggaaaacctgggacagcatactattcattctctgctacaagttccaggaggagaccactccatgactctgcagcgcttgatcccttgcaagcaaaaaaagtcagaaaggtgcctcctggtttgccttcttctgtatatgcaccatccccaaattcagatgatttcaaccgtgaatctcctagttatccatctcctaagccaccaaccagtatgttcgctagcactttctttatgcaagatgggacccacaattcttctgacctttggagttcatcaaatgggatgagccagcctggttttggtggaattctggggacctccacttcccacatgtctcaatccagtagttatggcaaccttcattcacatgaccgcttgagttatcctccacactcagtttcaccaacagacataaacacgagtcttccaccaatgtccagctttcatcgcggcagtaccagcagttcaccttacgttgctgcctcacacactcctcccatcaatggatcagacagcattctaggaaccagagggaatgctgctggaagctcacagacaggtgatgcacttggaaaggctttggcatctatttattctcctgaccataccagcagtagttttccgtcaaatccatcaacaccagttggatcaccttcacctctcacaggtaccagtcagtggccaagacctggagggcaagcaccttcatccccaagctatgaaaactcactccactccctgaaaaatcgagttgagcagcaacttcacgagcatttgcaagatgcaatgtccttcttaaaggatgtctgtgagcagtctcgaatggaggatcgtttagacagactggatgatgcaatccatgtgctgcggaaccatgctgtgggaccttccaccagtttgcctgctggtcacagtgatatacatagtttattgggaccatcccataatgcaccaattggaagcctcaattcaaactatggaggatcaagccttgttgcaagcagtcgatcagcttcaatggttggaactcatcgggaagactctgtcagtctcaatggcaatcattcagtcctgtctagtacagtcactacttcaagcacagacctgaaccataaaacacaagaaaattatagaggtggcttgcaaagtcagtctggaactgttgttacaacagaaatcaagactgaaaacaaagaaaaggatgaaaaccttcatgaacctccttcatcagatgacatgaagtcagatgatgaatcctcccaaaaagatatcaaggtttcatctagaggcagaacaagcagtactaatgaagatgaggatttgaaccctgaacagaagatagaaagggagaaggagaggcggatggctaacaatgccagagaacgcttacgcgtgcgggatattaatgaagcattcaaagagcttggccgaatgtgtcagcttcacttgaagagtgaaaaaccccaaacaaaactccttattcttcatcaagccgtggcagtcatccttagtctagaacagcaagtcagagagaggaaccttaaccccaaagcagcctgccttaagagaagggaagaagaaaaagtttctgccgtatcggcagagccgccaaccacactgccaggaacccatcctgggcttagtgaaactaccaaccctatgggtcatatgtaaacatcagccagttccagagttatcagtaggctagatagaaggtgacctctcctcataaggacttggacaactcagattatctgaagacacaaacctgacaggagggagaagaaaaaacaaaacacttgaaccaagaaactcaaatgtaatcctacgatcaaagcaactggtcaacacttccatcagaagtgaagataggaagctcatcagatagaacatcagcccatgagatgtttgcaacaaatcttttgttgcaagcagtgtgtcgcttctgcacaatcagagactgtctcgatctctccactcaccgtggaagttgccttgtgcctaaactgaattgacaaatgcattgtaactacaaattttatttattgttatgaaactgtaaggtctacatataaagggaaaaagttaatgtggaaagctgatctacactcagctgatgccagcatacattaaagcggttcacgtgcagagaacaaagcagtgacaaccattggcccttagcattcccggcatacctattagtgtcttaaaaaggaagggaaaagtcttttgttgccctctcctatcctcttgccatatgaatagcgttttccatgaaataggaaaatattacttggtatagcatttctcttgctctcattttttgatttatttttattttctctttgtgggtgttatatttgatctctaaatctgaacagtttatggtcacagtccagcctcctccgtgcagccctgtgtgctttgcacatttaccttacagtggtaagcagagaccatctgtgaccatagcctagctagcattttaaaaggggaaattttgttctctaggttttcccccaaataaacattgctttatttctaataataaccaagacttttcaagcttctagatctcataggaaagcttgtaatagcaaaattgtaaattacaagggaagaatctactttttagaaatcgctttgttttccaagcagtaagtactacatacagtacttgtaaagtgttagctgtaagtaagcacaaaatacatttaaaatacaaagacgattttttcaggctgtgattatggtgaacataacaaaacccagtagtcaccaaggcaggtagtgtgataaatgaacacaccactctgaggctaattacctaatggaatacaagagcaatggtcacccgtatttccttatcctagcctttatttctctgtcatttggatggctggtcaatggggaagaattgagtgggtgatttaatcaactgcaaaccatctgcccctgtcccaaaatgatgagccagattagcattaaaccagtacttgtcagtccatcttaatactgttcattaaggcactctctgtctctaatccttaggagttgttttaaaagacataatcactttgaacttccatgaaacctgtcttccaccacaacaaccctgggagagaaaaacatgctaaaggaggtatcttggcttaataattccttatagccaatatcaacagtggcaatcagcacacagaggaaaggacccaaatcactatgtagcttaaagatttctgttaatttgaaagaacaaaaacaagacagaacttctggtactctaatcaggatgattcctaacaagtcagtcatttgtgaacttagtggactttttggttactttaatttgcatatattctccagttacatcggactctatctgtggccttgttcttcatttcagtgttaatcagctaaacagaagttgttgcttatgatgtgtgagtgaacatatgccactgcctggcctttttttcttcagagcttgttgtctttttcgctatattagactttgcagtatgcccagaagctttccttcataaaatagaaagaaaaaaacatttggcttatttttcactgtagctagtcttttatacaataatcttgtaagaaaatttcttgaattctaaatattactctttctagatttttgaaatcaaaaagttttcagtaaaaagtttcttactttattttattatattaggtagtaaaaaatgtagggttatttaccataacctgttcattaatatcagaaatttacaatagcattttaagaccatagtaggattctagcataccgtgtagtacctatggagtattgtaagagctaattgttggagatgaattgcttctcatcttgttctccagtttccattgttggtttattgcagatttgtatcctgtgtcaaattcaaggtattattgataaaccttttcaaccagcagcaagaagttcaaatttttttctgtcactgtaacagaaaacacaatatgtatataacatttatgtagcaataaatgtgccatcttttttttaacacagtaaaaaaaaaaaaaaaaaaaaaa

SEQ ID NO: 7048 - DNA, 4717 bp, Homo Sapiens
  NM_207038
tccggaggcgagccgagcgcggtggtgaggccgcctcagcgaaaaaaatgtccgcctgaagagacccacaagttctattcggggggaccgacagcccgccccgggaggaaggggcggccaggcccgaaagccgcctccccctcccagacccgagagctcgtgcggggcaaagtgaaccgagccgctgggcggtgcaaggggaagcccaagcccgttctcccggccaaagtgaactttaatcggggtggttggatgcggagacggggcggcagaagtggccgaagatgaatccccagcaacaacgcatggccgctatagggaccgacaaggagctgagcgacctactggacttcagtgcgatgttttccccacctgttaatagtgggaaaactagaccaactacactgggaagcagtcaattcagtggatcaggtattgatgaaagaggaggtacaacatcttggggaacaagtggtcaaccaagtccttcctatgattcatctagaggttttacagacagccctcattacagtgatcacttgaatgacagtcgattaggagcccatgaaggcttgtccccaacacctttcatgaactcaaatctgatgggaaaaacatcagagagaggctcattttccctgtacagcagagatactggattaccaggctgtcaatctagtctcctgagacaagatctggggcttgggagcccagcacagctatcttcttcaggaaaacctgggacagcatactattcattctctgctacaagttccaggaggagaccactccatgactctgcagcgcttgatcccttgcaagcaaaaaaagtcagaaaggtgcctcctggtttgccttcttctgtatatgcaccatccccaaattcagatgatttcaaccgtgaatctcctagttatccatctcctaagccaccaaccagtatgttcgctagcactttctttatgcaagatgggacccacaattcttctgacctttggagttcatcaaatgggatgagccagcctggttttggtggaattctggggacctccacttcccacatgtctcaatccagtagttatggcaaccttcattcacatgaccgcttgagttatcctccacactcagtttcaccaacagacataaacacgagtcttccaccaatgtccagctttcatcgcggcagtaccagcagttcaccttacgttgctgcctcacacactcctcccatcaatggatcagacagcattctaggaaccagagggaatgctgctggaagctcacagacaggtgatgcacttggaaaggctttggcatctatttattctcctgaccataccagcagtagttttccgtcaaatccatcaacaccagttggatcaccttcacctctcacaggtaccagtcagtggccaagacctggagggcaagcaccttcatccccaagctatgaaaactcactccactccctgcagtctcgaatggaggatcgtttagacagactggatgatgcaatccatgtgctgcggaaccatgctgtgggaccttccaccagtttgcctgctggtcacagtgatatacatagtttattgggaccatcccataatgcaccaattggaagcctcaattcaaactatggaggatcaagccttgttgcaagcagtcgatcagcttcaatggttggaactcatcgggaagactctgtcagtctcaatggcaatcattcagtcctgtctagtacagtcactacttcaagcacagacctgaaccataaaacacaagaaaattatagaggtggcttgcaaagtcagtctggaactgttgttacaacagaaatcaagactgaaaacaaagaaaaggatgaaaaccttcatgaacctccttcatcagatgacatgaagtcagatgatgaatcctcccaaaaagatatcaaggtttcatctagaggcagaacaagcagtactaatgaagatgaggatttgaaccctgaacagaagatagaaagggagaaggagaggcggatggctaacaatgccagagaacgcttacgcgtgcgggatattaatgaagcattcaaagagcttggccgaatgtgtcagcttcacttgaagagtgaaaaaccccaaacaaaactccttattcttcatcaagccgtggcagtcatccttagtctagaacagcaagtcagagagaggaaccttaaccccaaagcagcctgccttaagagaagggaagaagaaaaagtttctgccgtatcggcagagccgccaaccacactgccaggaacccatcctgggcttagtgaaactaccaaccctatgggtcatatgtaaacatcagccagttccagagttatcagtaggctagatagaaggtgacctctcctcataaggacttggacaactcagattatctgaagacacaaacctgacaggagggagaagaaaaaacaaaacacttgaaccaagaaactcaaatgtaatcctacgatcaaagcaactggtcaacacttccatcagaagtgaagataggaagctcatcagatagaacatcagcccatgagatgtttgcaacaaatcttttgttgcaagcagtgtgtcgcttctgcacaatcagagactgtctcgatctctccactcaccgtggaagttgccttgtgcctaaactgaattgacaaatgcattgtaactacaaattttatttattgttatgaaactgtaaggtctacatataaagggaaaaagttaatgtggaaagctgatctacactcagctgatgccagcatacattaaagcggttcacgtgcagagaacaaagcagtgacaaccattggcccttagcattcccggcatacctattagtgtcttaaaaaggaagggaaaagtcttttgttgccctctcctatcctcttgccatatgaatagcgttttccatgaaataggaaaatattacttggtatagcatttctcttgctctcattttttgatttatttttattttctctttgtgggtgttatatttgatctctaaatctgaacagtttatggtcacagtccagcctcctccgtgcagccctgtgtgctttgcacatttaccttacagtggtaagcagagaccatctgtgaccatagcctagctagcattttaaaaggggaaattttgttctctaggttttcccccaaataaacattgctttatttctaataataaccaagacttttcaagcttctagatctcataggaaagcttgtaatagcaaaattgtaaattacaagggaagaatctactttttagaaatcgctttgttttccaagcagtaagtactacatacagtacttgtaaagtgttagctgtaagtaagcacaaaatacatttaaaatacaaagacgattttttcaggctgtgattatggtgaacataacaaaacccagtagtcaccaaggcaggtagtgtgataaatgaacacaccactctgaggctaattacctaatggaatacaagagcaatggtcacccgtatttccttatcctagcctttatttctctgtcatttggatggctggtcaatggggaagaattgagtgggtgatttaatcaactgcaaaccatctgcccctgtcccaaaatgatgagccagattagcattaaaccagtacttgtcagtccatcttaatactgttcattaaggcactctctgtctctaatccttaggagttgttttaaaagacataatcactttgaacttccatgaaacctgtcttccaccacaacaaccctgggagagaaaaacatgctaaaggaggtatcttggcttaataattccttatagccaatatcaacagtggcaatcagcacacagaggaaaggacccaaatcactatgtagcttaaagatttctgttaatttgaaagaacaaaaacaagacagaacttctggtactctaatcaggatgattcctaacaagtcagtcatttgtgaacttagtggactttttggttactttaatttgcatatattctccagttacatcggactctatctgtggccttgttcttcatttcagtgttaatcagctaaacagaagttgttgcttatgatgtgtgagtgaacatatgccactgcctggcctttttttcttcagagcttgttgtctttttcgctatattagactttgcagtatgcccagaagctttccttcataaaatagaaagaaaaaaacatttggcttatttttcactgtagctagtcttttatacaataatcttgtaagaaaatttcttgaattctaaatattactctttctagatttttgaaatcaaaaagttttcagtaaaaagtttcttactttattttattatattaggtagtaaaaaatgtagggttatttaccataacctgttcattaatatcagaaatttacaatagcattttaagaccatagtaggattctagcataccgtgtagtacctatggagtattgtaagagctaattgttggagatgaattgcttctcatcttgttctccagtttccattgttggtttattgcagatttgtatcctgtgtcaaattcaaggtattattgataaaccttttcaaccagcagcaagaagttcaaatttttttctgtcactgtaacagaaaacacaatatgtatataacatttatgtagcaataaatgtgccatcttttttttaacacagtaaaaaaaaaaaaaaa

SEQ ID NO: 7049 - DNA, 666 bp, Homo Sapiens
  NM_207103
tccagccactgctgtctccttagctgctcacatatggatactttcacagttcaggattccactgcaatgagctggtggaggaataatttctggatcatcttagctgtggccatcatcgttgtctctgtgggtctgggcctcatcctgtactgtgtctgtaagtggcagcttagacgaggcaagaaatgggaaattgccaagcccctgaaacacaagcaagtagatgaagaaaagatgtatgagaatgttcttaatgagtcgccagttcaattaccgcctctgccaccgaggaattggccttctctagaagactcttccccacaggaagccccaagtcagccgcccgctacatactcactggtaaataaagttaaaaataagaagactgtttccatcccaagctacattgagcctgaagatgactatgacgatgttgaaatccctgcaaatactgaaaaagcatcattttgaaacagccatttcttctttttggcaaaactgaagagggttcacacaacttattttaaaacaatcaagaatggttgaacttcagtaggtctctgggccctgaaagccagtggtgattttatgaagctctataagataaagcacttcccaaaccttagatgaagacacccctgcgatcggatgactgcagccagagga

SEQ ID NO: 7050 - DNA, 5867 bp, Homo Sapiens
  NM_207111
agtgcctctatggttcttcctgtccttagtcgggagggggcgctgtgcgcaggcgcgaggtgacgccgcggcagggccggaaggagtgcagcggctgccacggagctcgcagctgcggcttctgaggagtaagcggcgcggtagcgaaggccgccgaacctgcctggctagccggcgacttgagtgacgactcttttgaaacagatggtcaccatgtttagatattagcagtcccatatatgcatgtctgcatttgaaaatggaagagggaaacaacaatgaagaggtaattcacttgaacaactttcactgccatcggggacaagagtggatcaatctccgagatgggcccatcaccatatctgactcctcagatgaggaaaggattccaatgctggtcaccccagctcctcagcagcatgaagaagaggacctggatgatgatgtcatcctgacagaaacaaataaacctcagagatcacgacccaatctcatcaaaccagctgcccagtggcaagatctgaaaaggttgggagaagaaaggcctaaaaagtctagagcagcatttgaatcagataagagcagctatttttcagtgtgtaacaacccattgtttgattctggggcacaggatgattctgaggatgactacggtgaatttctggatcttgggcctcctggaatctctgaattcactaagccaagtggccaaacagaaagagaacccaagcctggaccgagtcataaccaagcagcaaatgacattgtcaaccccagatcagagcagaaagtcatcatcttggaagaaggtagccttctttacacagaaagcgatcctttggaaactcagaaccagtcatccgaagactcagagacagagctgttatcaaatctaggagagtcagctgctctagcagatgatcaggccatcgaagaagactgctggttagatcatccttacttccagtctctgaaccaacagccccgtgaaataacaaaccaggtcgttcctcaggaacggcagcctgaagcagaactgggccgcttgttgtttcagcatgaattcccagggcccgcttttccaaggccggaaccccagcaaggtgggatttcaggcccctcttctcctcagcctgcccatcctctaggagagtttgaagaccagcagttagcaagtgatgatgaagagccaggtccagcctttccaatgcaagaatctcaagagcccaatttggaaaacatttgggggcaagaagctgcagaggtagatcaagagctcgttgaactactagtgaaagaaacggaagcaagatttccagatgtagcaaatgggtttattgaggaaataattcattttaagaattattatgatctgaatgtactttgtaattttcttctggaaaacccagattatccaaagagagaagacagaatcattataaatcccagtagcagtctgctggccagccaagatgagacaaagttgcctaaaatagacttttttgactattctaaattgacccctcttgaccagcgctgcttcatccaagctgctgacctcctcatggccgacttcaaagtgctcagtagtcaggacatcaagtgggccctgcacgagctcaaaggacactatgcaatcacccgaaaggccttgtctgatgccattaaaaaatggcaggagctgtcaccagaaaccagtggaaaaaggaagaagagaaaacaaatgaaccagtattcttacattgatttcaagtttgaacaaggtgacataaaaatagaaaagaggatgttctttcttgaaaataagcgacgacattgtaggtcctatgaccgacgtgctctccttccagctgtgcaacaagagcaggagttctatgagcagaaaatcaaagagatggcagagcatgaagactttttgcttgccctacagatgaatgaagaacagtatcaaaaggatggccagctgattgagtgtcgctgctgctatggggaatttccattcgaggagctgacgcagtgcgcagatgctcacttgttctgcaaagagtgtctcatcagatatgcccaagaggcagtctttggatctggaaagttggagctcagctgcatggaaggcagctgcacgtgttcgttcccaaccagtgagctggagaaggtgctcccccagaccatcctgtataagtactatgagcgaaaagccgaggaggaggttgcggcagcctacgccgacgagcttgtcaggtgcccgtcctgtagctttccggctctgttggacagtgatgtgaagaggttcagctgtcctaatcctcactgccgaaaggaaacctgtaggaagtgtcagggactctggaaagaacataatggcctcacctgtgaagagctggctgaaaaagacgacatcaagtaccgtacctctattgaagaaaaaatgactgctgcccgcattagaaaatgccacaagtgtgggactggcctcatcaaatctgaaggctgcaaccgcatgtcttgccgctgtggtgcccagatgtgctacctctgtcgagtttctattaatggatatgaccatttctgccaacatccccgctcaccaggagccccttgccaggagtgttcaagatgctctctctggaccgatcccactgaagatgatgagaagcttattgaggaaatccagaaggaggctgaagaggaacagaaaagaaagaatggagagaacaccttcaaacgcattggacccccgctggagaagcctgtggagaaggtgcagagggtggaggccctcccgaggcccgttccgcagaacctgccacagccacagatgccaccctatgccttcgcgcacccacccttccccctgcctcccgtgcggcctgtgttcaacaacttcccactcaacatggggcctatcccagccccgtacgtgccccctctgcccaacgtgcgggtcaactatgacttcggtcccatccacatgcccctggagcacaacctgcccatgcactttggcccccagccgcggcatcgcttctgatggccccgaatccccattgagcagcacaaagcccgtttggggtaggagtgtggatggagaaccctcccccaaggctggtgtctgtaccattgcatcctaagtcagcttgaagggtaggctggttttcttcccacccctttcctagaagggctactgctcctggaagagtggacggatccataataaagacgtcccaaatggtggagttcggagagagctgcgatgtgaactgcccctcccctcgcatcccccaggccaccaacggcagtccttctgccttgtccatggcataggccatagaccaggtccctgctgctcacacctgggcctctcctcggagccgacccctgggtagcaaggcagccgagagcatctccctggaggggcccacggttgggccaagggcagagggggctgcacctgcgggcctgggaagcattgctcagggtggggggctgggaccatggcccgcagaggcactgccacagctgtgagggccaagatgctgtccccccatccaaaacccgtgcgccactgcagtgagtgttgagggcacctctcctcccctcttacacctactcagatgaggcagcagcagacccatctcgcggcgggggttttgttctgttgccgcctaactttctcatcctcggtctctggaaagtcaggctgagaaatcctttcccaggccaggccgctgcggtacactggatggttctgaagctggcccattgaaagagcctcttaaggcagctgggacagaggcctggtggccctgctgggcagcccaactgctgggggagacgtttctgccaccctgggtgatgagcagcttttcccccctggctttctgggggaggagtgggcctccttagggagacaggtgaccctgggtgccacccctgccccgtgtgtgccccgggtgttctcagtggttgctgaaggcaggtagagggtgctgtccagtatcccccatgtgaaggtcacttcccttctcatggagtcagctgagcatcagctcagccctgccatgtccccactcaccctcctcgcctcctgtccggccctgggtttctagcggtgcctgaggcatcactctggcccattgacagatgagaggtctgaagccttcctggccacaggcatcactttctcctcctcctcatgccctgccttgtccttgtcgtgttgccatggggttctgagaggctgggagttcacagacctcagacacagctgagtccgacaaccattggggtggggctgcatcagtctccggagtggcccgccacctcctgaagcagggcctggcccacccaaggtgcctggggcaggcgggcaccgtcattcgctgccattggcttctcagatgtatttcaaggactaaagtgggctctaagatctaagatggcccggcgcggtggctcccgcctgtaatcccagcactttgggaggccgaggcgggcggatgagttgaggtcgggagtttgagtccccgtctctactaaaaatacaaaattagccggacaaggtggcgcatgcctataatcccaggtactcaggaggctgaggcaggagaatcacttgaacctgggaggcagaggttgcagtgagccaagattgtgccactgcactccagcctgagcaacaaaagcaaaactctatctttaaaaaaaaaaaaaaaaaaactaagatacccattctttctgcctttgcccaggatggaggctttgaagacaggtggtcacctggacctggggtaagggtgcgcagggaggccgggcttgggggcagcctgctgctatgtccttgctggcgcccatacctgttggactgcctgaactttgctactagcctgaacgacagtgccttggaaaggcaggctccatgcggcagcaacaggattgtcttcggtaccttaaatatgctccctgtgcttccccagggaggatctctgggagcagagggcggctgtagacatcacagctgaagaggtgacctcaggccctgggagcctcagctccctctgccctgtaccctaggcacgtggctccagcaagagccccaggcaggacaaagggagcaggcagcagctgcagaaacagccctagacaggtgctggcctcaaccctggcaggggagggggagcccagagtgatgtttctcctaaggccaaaccccaggggtgggtcatttgagaggagttccagctgttctggccacactgggctggtggggaaggagcggcggcctctttccttggagggtccctgattcctgaggatcctccccgagccaggcacgggggaccacagggctgccgtgagcacccaccctggttctccaggcccctctgtccagaggcagggcctgaacctcgggctcctgcctggaccagtgacagcattggggagagaagcactgggggtcttcagaccagccagcaaggggccgtgccagtgcccagagagcaggtcagacaacaggcaaccctgaggcagctggctccctctctctgccctgcagggcttgccgcagggcgtgaggctccccagccacagccccctcttacttgccttaaaactggagagaggaatctagtatttgcacttagcaaaatatttaaaaactgaaaaaaatgtgcatgatctgtcactttgtataaaaacaagaaacgattagttcattaaactttttctttaccttctggtagtaaaaatagataaaataattccgtttcaactactgtgtgtaaaaagcctgtatcatatgtaactgggacttttgtaaataaatgtttgtgcgctctgctccctccaaaaaaaaaaaaaaaaaa

SEQ ID NO: 7051 - DNA, 1728 bp, Homo Sapiens
  NM_207112
ggccttgtggtctcatcgcgcgcaggatccgggccgggcgggggcgggggcggggcgcgtccgcggaggggggcggttggcggctcccgagcccagcgccgcgctcagtccggaccccgtgaccggcggccgaggccccgcctccgtcagtctgtccttcgggtcctcagcacagccgtgccgcccttcctagggtgtggagagcgggccccgccctgaaggggcaccgtgggctggggggcctgttttggagcaggcaccggtggccgagctccgtgaccatgaaggtcaaggtcatccccgtgctcgaggacaactacatgtacctggtcatcgaggagctcacgcgcgaggcggtggccgtggacgtggctgtgcccaagaggctgctggagatcgtgggccgggagggggtgtctctgaccgctgtgctgaccacccaccatcactgggaccacgcgcggggaaacccggagctggcgcggcttcgtcccgggctggcggtgctgggcgcggacgagcgcatcttctcgctgacgcgcaggctggcgcacggcgaggagctgcggttcggggccatccacgtgcgttgcctcctgacgcccggccacaccgccggccacatgagctacttcctgtgggaggacgattgcccggacccacccgccctgttctcgggcgacgcgctgtcggtggccggctgcggctcgtgcctggagggcagcgcccagcagatgtaccagagcctggccgagctgggtaccctgccccccgagacgaaggtgttctgcggccacgagcacacgcttagcaacctggagtttgcccagaaagtggagccctgcaacgaccacgtgagagccaagctgtcctgggctaaggcacggcccctttcccgccgcggcaagagggtggggggggagggaacaggcttcggggtggggggggctctcagacaaggcctaatggtgaccggggcctgtggtcactccagaagagggatgaggatgacgtgcccactgtgccgtcgactctgggcgaggagcgcctctacaaccccttcctgcgggtggcgtgagtatggctgttgtcccggggcctccaccgttacgtggacccttaggaaggcatctggggactgcgtgttgggctgagtgagcatctctggcttgggggaggctgctcattaagtgcctgcctgcccgcccacccctcggcgccatgctcccgcgtgggcagcgggccctgcgcctcactgcacccctccctgcagagaggagccggtgcgcaagttcacgggcaaggcggtccccgccgacgtcctggaggcgctatgcaaggagcgggcgcgcttcgaacaggcgggcgagccgcggcagccacaggcgcgggccctccttgcgctgcagtgggggctcctgagtgcagccccacacgactgagccacccagaccctcacagggctggggcctgcgtccctcctcgtgacctcggccagctggacccacatgagggccacctctggaaccttcttcgaggccctggccagccatctgcccagcctcggagggtgggcaacctggtgcttcccgggtggacacacaggaccactcagtggggcctgtgtgggcgccgagacctgggtgtctgggaagtggggcacacggggcctccgaactatgaataaagctttgaaaggccaaaaaaaaaaaaaaaaaaaaaaaaaaa

SEQ ID NO: 7052 - DNA, 3335 bp, Homo Sapiens
  NM_207113
aggggtgagctggcggcgggggaggcgggcagcggagccaagctgacccggcgagcggagccggggctggagagcggcgaccactgcggatctcggaaggaagaaatgatgtaaatcactcatccaaaccttaaggtcaaaggtgagaaggaaggtcaggaagaacatggcctggccaaatgtttttcaaagagggtctctgctgtcccagttcagccatcatcatgttgtagtgttcctgctcactttcttcagttattcgttgctccatgcttcacgaaaaacatttagcaatgtcaaagtcagtatctctgagcagtggaccccaagtgcttttaacacgtcagttgagctgcctgtggagatctggagcagcaaccatttgttccccagtgcagagaaagcgactcttttcctcggcacactggataccattttcctcttctcctatgctgtgggcctattcatcagtggcatcgttggggatcggttgaatttgcgatgggttctgtcttttggcatgtgctcttctgcattagtggtgtttgtctttggtgcgctcacagaatggctgcgtttctacaacaaatggctgtactgctgcctgtggattgtgaacggcctgctgcagtccactggttggccctgtgtggttgctgttatgggcaactggtttgggaaagccggacgaggagttgtttttggtctctggagtgcctgtgcttcggtgggcaacattttgggagcgtgcctagcttcttctgttcttcagtatggttatgagtatgcctttctggtgacggcgtctgtgcagtttgctggtgggatcgttatcttctttggactcctggtgtcaccagaagaaattggtctctcgggtattgaggcagaagaaaactttgaagaagactcacacaggccattaattaatggtggtgaaaatgaagacgaatatgagccgaattattcaatccaagatgatagttctgttgcccaagtcaaggcgataagcttctaccaggcatgttgccttcctggagtcataccgtactcactggcctacgcctgcttgaagttagtgaattactccttcttcttctggctccccttttatctgagtaacaacttcggctggaaggaggcggaagccgacaagctgtccatttggtacgacgttggagggatcataggtggaactttgcaaggcttcatctctgatgtactacagaagagagcgccggttcttgccctgagtctgcttctggcagttgggtccctcatcgggtatagtcgttctccaaatgataagtccatcaatgcccttctgatgactgttacaggattttttattggtggaccttctaatatgattagttctgctatttctgcggacttgggtcgccaggagctcatccaaaggagcagtgaagctttggccactgtcacaggaattgtggatggttcggggagcattggagctgcagtgggccagtatttagtgtctctgatccgggacaagctaggatggatgtgggttttctactttttcattctcatgacaagttgtacaattgtgtttatctcgccattaatagtgagggaaatattctctctcgtgctaaggagacaggctcacatattgagggagtgaccggtgcccgcgagacagaaagaacaatgtcagccacatcaggaccgctggggcttcgagtctgccctaatttgggtttgtctaggagctccagcctgatcttggattgtcaggcgtctctcaacactgccagccacctgagatgctgaccagcagtgaaggctgcactagttttctacactacaggaattactgttgatgatttttgctgttgtttcatgaatgtgccgagtgacttctgactctgccagcatctttgacctctgactctgcccgcgtctttgtttggcctattgaggtttagcgttttaaccttaactgttgttttggacttgaactttctctagccttgaaaatggagtgaacaggaggcaaagccacgcgtggtttgtgttggtggtatgttccacaaatggaagagatcattgcattttgctttggtaatgagtttacagagagtgggtcatctttgaagcatcaaatcctgatcaaatgctcaagctggaccgagctgcaagcctgccttggacaaagaatccctctgttcactgtggtgggaaagatcacactacatgcctgttgattggctcagtcactctgtgtctgatctaaacgtcattcagccctagaagcatgaattgcttcaaattattgtcaacttgttctcttccattttcattcaaattaactttgactcctggaagtattgagtcttcctttcaaggaccataaggtacatcagttatcttgaacattctgacgtgtaaaggaccataaggtacatcatttatcttgaacattccgacgtgtaactcacagccgaagcactccatcccagatttgttgtctgggaacttaggatcctctaggaagctaatctgcttagtctatttttagaggattgatctctggcacaagcagcttcctggagttacctcagcagaagactagaattagagaaaagggaaagaccttttcttctagtaagtgtcaagtacagatgctctttgacttatgatggggttatgtcccagtaaacccattggaagtcaaatgcatttaatacccctgactggacaccacagcttagcctcgtccaccctaaatgtactcagaacacttagaattgcccacagttgggcagaatcatctaacacaaactctattttataatcgagtgttgaatatatcatgtaatttattgaatattgtacattatgttgaaattgcaaccatttcacaccattgtaaagtccaaaaatcagaagctgaggactgtctgtacatgacattgaatcacatgaatggattactagggcctgaggggtgtccgttctttagaaaaatgtagagtatatatatcttcagggctgtgaattccatactagttatcaatattttaagatcattctgtatatacatattttaaattatgcaagcaaactaggaggagaatgtgcaattttgagggatacctaatttgcattcggttaggggatatttttcaacctcttgctttatactctgatatggggtgtgtttatgaacttgttaatgttatttaatcatgcagatttccaatcagtgtattgctcatttactgacaaaaagggaaaatacgaaacacagaaagggaaaataaactgacttttataatgaaaaaaaaaaaaaaaaaaaaaaaaaa

SEQ ID NO: 7053 - DNA, 3651 bp, Homo Sapiens
  NM_207122
ctgtctgagcatttcactgcggagcctgagcgcgcctgcctgggaaaacactgcagcggtgctcggactcctcctgtccagcaggaggcgcggcccggcagctcccgcatgcgcagtgcgctcggtgtcagacggcccggatcccggttaccggcccctcgctcgctgctcgccagcccagactcggccctggcagtggcggctggcgattcggaccgatccgacctgggcggaggtggcccgcgccccgcggcatgagccggtgaccaagctcggggccgagcgggaggcagccgtggccgaggagtgtgaggaagaggctgtctgtgtcattatgtgtgcgtcggtcaagtataatatccggggtcctgccctcatcccaagaatgaagaccaagcaccgaatctactatatcaccctcttctccattgtcctcctgggcctcattgccactggcatgtttcagttttggccccattctatcgagtcctcaaatgactggaatgtagagaagcgcagcatccgtgatgtgccggttgttaggctgccagccgacagtcccatcccagagcggggggatctcagttgcagaatgcacacgtgttttgatgtctatcgctgtggcttcaacccaaagaacaaaatcaaggtgtatatctatgctctgaaaaagtacgtggatgactttggcgtctctgtcagcaacaccatctcccgggagtataatgaactgctcatggccatctcagacagtgactactacactgatgacatcaaccgggcctgtctgtttgttccctccatcgatgtgcttaaccagaacacactgcgcatcaaggagacagcacaagcgatggcccagctctctaggtgggatcgaggtacgaatcacctgttgttcaacatgttgcctggaggtcccccagattataacacagccctggatgtccccagagacagggccctgttggctggtggcggcttttctacgtggacttaccggcaaggctacgatgtcagcattcctgtctatagtccactgtcagctgaggtggatcttccagagaaaggaccaggtccacggcaatacttcctcctgtcatctcaggtgggtctccatcctgagtacagagaggacctagaagccctccaggtcaaacatggagagtcagtgttagtactcgataaatgcaccaacctctcagagggtgtcctttctgtccgtaagcgctgccacaagcaccaggtcttcgattacccacaggtgctacaggaggctactttctgtgtggttcttcgtggagctcggctgggccaggcagtattgagcgatgtgttacaagctggctgtgtcccggttgtcattgcagactcctatattttgcctttctctgaagttcttgactggaagagagcatctgtggttgtaccagaagaaaagatgtcagatgtgtacagtattttgcagagcatcccccaaagacagattgaagaaatgcagagacaggcccggtggttctgggaagcgtacttccagtcaattaaagccattgccctggccaccctgcagattatcaatgaccggatctatccatatgctgccatctcctatgaagaatggaatgaccctcctgctgtgaagtggggcagcgtgagcaatccactcttcctcccgctgatcccaccacagtctcaagggttcaccgccatagtcctcacctacgaccgagtagagagcctcttccgggtcatcactgaagtgtccaaggtgcccagtctatccaaactacttgtcgtctggaataatcagaataaaaaccctccagaagattctctctggcccaaaatccgggttccattaaaagttgtgaggactgctgaaaacaagttaagtaaccgtttcttcccttatgatgaaatcgagacagaagctgttctggccattgatgatgatatcattatgctgacctctgacgagctgcaatttggttatgaggtctggcgggaatttcctgaccggttggtgggttacccgggtcgtctgcatctctgggaccatgagatgaataagtggaagtatgagtctgagtggacgaatgaagtgtccatggtgctcactggggcagctttttatcacaagtattttaattacctgtatacctacaaaatgcctggggatatcaagaactgggtagatgctcatatgaactgtgaagatattgccatgaacttcctggtggccaacgtcacgggaaaagcagttatcaaggtaaccccacgaaagaaattcaagtgtcctgagtgcacagccatagatgggctttcactagaccaaacacacatggtggagaggtcagagtgcatcaacaagtttgcttcagtcttcgggaccatgcctctcaaggtggtggaacaccgagctgaccctgtcctgtacaaagatgactttcctgagaagctgaagagcttccccaacattggcagcttatgaaacgtgtcattggtggaggtctgaatgtgaggctgggacagagggagagaacaaggcctcccagcactctgatgtcagagtagtaggttaagggtggaaggttgacctacttggatcttggcatgcacccacctaacccactttctcaagaacaagaacctagaatgaatatccaagcacctcgagctatgcaacctctgttcttgtatttcttatgatctctgatgggttcttctcgaaaatgccaagtggaagactttgtggcatgctccagatttaaatccagctgaggctccctttgttttcagttccatgtaacaatctggaaggaaacttcacggacaggaagactgctggagaagagaagcgtgttagcccatttgaggtctggggaatcatgtaaagggtacccagacctcacttttagttatttacatcaatgagttctttcagggaaccaaacccagaattcggtgcaaaagccaaacatcttggtgggatttgataaatgccttgggacctggagtgctgggcttgtgcacaggaagagcaccagccgctgagtcaggatcctgtcagttccatgagctattcctctttggtttggctttttgatatgattaaaattattttttattcctttttctactgtgtcttaaacaccaattcctgatagtccaaggaaccacctttctcccttgatatatttaactccgtctttggcctgacaacagtcttctgcccatgtctgggaacacacgccaggaggaatgtctgataccctctgcatcaagcgtaagaaggtcccaaatcataaccattttaagaacagatgactcagaaacctccagaggaatctgtttgcttcctgattagatccagtcaatgttttaaaggtattgtcagagaaaaacagagggtctgtactagccatgcaaggagtcgctctagctggtacccgtaaaagttgtgggaattgtgacccccatcccaaggggatgccaaaatttctctcattcttttggtataaacttaacattagccagggaggttctggctaacgttaaatgctgctatacaactgctttgcaacagttgctggtatatttaaatcattaaatttcagcatttactaatactgcaaaaaaaaaaaaaaaaaa

SEQ ID NO: 7054 - DNA, 1467 bp, Homo Sapiens
  NM_207127
cctcgctccgcctccggcctcctccgagagctccagacctcccggctactcagaagccctcggactgcccggaccgcgcgatggagtcgaccggcagcgtcggggaggccccgggcggaccccgggtgctggtggtgggcggcggcatcgcggggctgggcgcggcgcagaggctctgcggccactccgccttcccgcacctgcgggtcctggaggccacggcccgcgccgggggccgcatccgctcggagcgctgcttcggtggcgtggtggaggtgggcgcgcactggatccatgggccctcccggggtaaccccgtcttccagctggctgctgagtacgggctgctgggggagaaggagctgtcccaggagaaccagctggtggagaccgggggtcacgtgggcctgccctccgtgagctacgccagctccggggccagcgtgagcctccagctggtggcggagatggcgactctgttctacggcctgatagaccagacccgggagttcctgcacgctgcagagaccccggtgcccagcgtcggggagtacctcaagaaggagattggccagcacgtggccggctggacagaggatgaggagaccaggaagctgaagctggccgtcctgaactccttcttcaacctggaatgctgtgtgagcggcacccacagcatggacctggtggccctggcaccctttggggagtataccgtgctgccggggctggactgcaccttttctaagggctatcaaggactcacaaactgcatgatggccgccctgccggaggacactgtagtttttgagaagcctgtgaagaccatccactggaacgggtccttccaggaggcagcctttcccggggagacctttccagtgtcggtagagtgtgaggatggagaccggttcccggcgcaccatgtcatcgtcaccgtgcccttaggtctgtccacgttctctgtgggttcattgccggacttgagtctgagttcatggagactctgtcggatgaagaagtacttctgtgtctcacccaagtgctccggagagtgacagctccagatcctgtttgcgggggaagccacacatcgcacgttttactccacgacgcacggggctctgctgtcgggatggagggaggccgaccgcctcctcagtctgtgggccccgcaggtgcagcagcccaggcccaggctctagctgggcccagcctactctgttccacccgtgtcgggggtaggctgggaccctcatttcttctgacagatttcagtctggcttgaaatttggggatgttaatgagggtcctctggtttttggtaaccagggccaccttctcagttcttgtgtctgttattggagtctggccagggttgacttgagctgagacaccagatgctcacggagatgctggacacataaagcaagttacagccacaaaaaaaaaaaaaaaaaaaaaaaa

SEQ ID NO: 7055 - DNA, 1720 bp, Homo Sapiens
  NM_207128
cctcgctccgcctccggcctcctccgagagctccagacctcccggctactcagaagccctcggactgcccggaccgcgcgatggagtcgaccggcagcgtcggggaggccccgggcggaccccgggtgctggtggtgggcggcggcatcgcggggctgggcgcggcgcagaggctctgcggccactccgccttcccgcacctgcgggtcctggaggccacggcccgcgccgggggccgcatccgctcggagcgctgcttcggtggcgtggtggaggtgggcgcgcactggatccatgggccctcccggggtaaccccgtcttccagctggctgctgagtacgggctgctgggggagaaggagctgtcccaggagaaccagctggtggagaccgggggtcacgtgggcctgccctccgtgagctacgccagctccggggccagcgtgagcctccagctggtggcggagatggcgactctgttctacggcctgatagaccagacccgggagttcctgcacgctgcagagaccccggtgcccagcgtcggggagtacctcaagaaggagattggccagcacgtggccggctggacagaggatgaggagaccaggaagctgaagctggccgtcctgaactccttcttcaacctggaatgctgtgtgagcggcacccacagcatggacctggtggccctggcaccctttggggagtataccgtgctgccggggctggactgcaccttttctaagggctatcaaggactcacaaactgcatgatggccgccctgccggaggacactgtagtttttgagaagcctgtgaagaccatccactggaacgggtccttccaggaggcagcctttcccggggagacctttccagtgtcggtagagtgtgaggatggagaccggttcccggcgcaccatgtcatcgtcaccgtgcccttaggttttcttagggaacatttggacaccttctttgaccctcccctgccggctgagaaggcagaagcaatcaggaagataggctttgggaccaacaacaaaatcttcctggagtttgaggagcccttctgggagccagactgccagctgatccagctggtgtgggaggacacgtcgcccctggaggatgctgcccctgagctacaggacgcctggttccggaagctcattggctttgtggtcctgcctgcctttgcgtctgtccacgttctctgtgggttcattgccggacttgagtctgagttcatggagactctgtcggatgaagaagtacttctgtgtctcacccaagtgctccggagagtgacagctccagatcctgtttgcgggggaagccacacatcgcacgttttactccacgacgcacggggctctgctgtcgggatggagggaggccgaccgcctcctcagtctgtgggccccgcaggtgcagcagcccaggcccaggctctagctgggcccagcctactctgttccacccgtgtcgggggtaggctgggaccctcatttcttctgacagatttcagtctggcttgaaatttggggatgttaatgagggtcctctggtttttggtaaccagggccaccttctcagttcttgtgtctgttattggagtctggccagggttgacttgagctgagacaccagatgctcacggagatgctggacacataaagcaagttacagccacaaaaaaaaaaaaaaaaaaaaaaaa

SEQ ID NO: 7056 - DNA, 1567 bp, Homo Sapiens
  NM_207172
gggctcagggagggctctgtgcctccgttcagcagagctgcagctgctgcccagctctcaggaggcaagctggactccctcactcagctgcaggagcaaggacagtgaggctcaaccccgcctgagccatgccagccaacttcacagagggcagcttcgattccagtgggaccgggcagacgctggattcttccccagtggcttgcactgaaacagtgacttttactgaagtggtggaaggaaaggaatggggttccttctactactcctttaagactgagcaattgataactctgtgggtcctctttgtttttaccattgttggaaactccgttgtgcttttttccacatggaggagaaagaagaagtcaagaatgaccttctttgtgactcagctggccatcacagattctttcacaggactggtcaacatcttgacagatattaattggcgattcactggagacttcacggcacctgacctggtttgccgagtggtccgctatttgcaggttgtgctgctctacgcctctacctacgtcctggtgtccctcagcatagacagataccatgccatcgtctaccccatgaagttccttcaaggagaaaagcaagccagggtcctcattgtgatcgcctggagcctgtcttttctgttctccattcccaccctgatcatatttgggaagaggacactgtccaacggtgaagtgcagtgctgggccctgtggcctgacgactcctactggaccccatacatgaccatcgtggccttcctggtgtacttcatccctctgacaatcatcagcatcatgtatggcattgtgatccgaactatttggattaaaagcaaaacctacgaaacagtgatttccaactgctcagatgggaaactgtgcagcagctataaccgaggactcatctcaaaggcaaaaatcaaggctatcaagtatagcatcatcatcattcttgccttcatctgctgttggagtccatacttcctgtttgacattttggacaatttcaacctccttccagacacccaggagcgtttctatgcctctgtgatcattcagaacctgccagcattgaatagtgccatcaaccccctcatctactgtgtcttcagcagctccatctctttcccctgcagggagcaaagatcacaggattccagaatgacgttccgggagagaactgagaggcatgagatgcagattctgtccaagccagaattcatctagaccctagggcagtgccagtgctaggctgagcaccatcagctctcccaggtccttgtcacctgcttgggcacgtgcatggaacccgagccaacttcaccccaccctcgtcattacctgggagatgcacaagacaaatgttctaatgactgcatgcactgcttaagtattggccaacacgaactccccagttattcatgccagccaggaaggaaacgccttccttccccaccattcccagccctccttcccactggccagcacctgaacccagtgaacacaggcattagtggtccagggtcctggcttggagccagtgagtagac

SEQ ID NO: 7057 - DNA, 2208 bp, Homo Sapiens
  NM_207305
gaagaccatcatccctggactacgttaggaggaagtggcaccgctccgaggtaggggaagaagggttataaagggaggcgtccaccacacatggtcttgaagaagcttttataaaaggcgaaggcatctttgccggacgttgttgcaaaggcgtagaaacaagcagaggaaaacatcccaaagggtaaccactagcgttcctgcttcttgcaacattcatcccgggcttccagctcagcccgccggggccaggtgatccggccgccacatcccctgcgactgaagcacctgctccgccatgaacttgccaagagctgagcgccttcgctccacaccgcagcgcagcctccgggactccgatggggaagacggtaaaatcgatgtcctgggagaggaggaagatgaagacgaggaggaggcggcgagccagcagttcctagagcagtcgctccagccggggctgcaggtggcccggtggggcggggttgcgcttccccgagagcacatcgagggcggcggcggcccgagcgacccctcagagtttggcaccgagttcagggcaccgccaaggtctgcggcggcctctgaagatgcccggcagccggcaaagcccccctcctcgtacatcgcgctcatcaccatggccatcctgcaaagcccgcacaagcgcctcacgctcagcggcatctgcgccttcattagtgaccgcttcccctactaccgccgcaagttccccgcctggcagaacagcatccgccacaacctctcgctgaacgactgcttcgtcaagatcccccgcgagccgggccgcccaggcaagggcaactactggagcctggaccccgcctcccaggacatgttcgacaatggcagctttctccggcgtaggaagcgtttccagcgccaccaaccgaccccgggagcccacctgccccaccccttccctctacctgctgcacacgccgccctgcacaacccccgcccaggccctctgcttggggcccctgccccgccgcagccagtcccgggggcctaccccaacaccggccccgggagacgcccttacgctctgctgcacccgcatcctcctcgctacctactgctctcggcccccgcctatgccggggcaccgaagaaagcagaaggcgcggacctggcgaccccggcacccttcccgtgctgcagccctcacttggtcctcagccttgggaggagggcaagggtctggcgtcgccaccgggaggcggatgcatctctttcagcattgagagtatcatgcaaggggtcaggggagcgggtacaggggctgcgcagagtttgtccccgaccgcgtggagctactgccccctgctccagcgaccgtcaagcctgtcggacaattttgcagcaacagcagcggcatcaggaggaggactgcgccaacggctgcgctcccaccaagggcgcggtgctgggcgggcacctgtcggccgcgtcggcgctgctgcggtatcaggcggtggcagagggctctgggctgacatcgctggccgcccctttgggcggagaggggacctcaccagtttttttagtatcgcccacgcccagttccctggccgagtccgcagggccctcctagagccaggtgggagtggggagcgacccgcagctgctcactccaccttgcgcggcccatactgggcgtgtgcatctgaatcccgctggagagcaaacacgaacttctgttccctgcaaaatggttagaaagaaacagctggattacgttcctctaaaaaccacctgaacgtaaccttcgcagggcgtcaagtcatcttttcttgccttcggttgtggcttctgtggctttcccgatttgcacatgtcctggggtactatgaacgtgagtggggtattttgttctggcattaaaagaaaaacaagcaagcaaacaaaaacacagcctccgatgccaaacatgttcccccttcttcacttccttggaactggaagtattattcctaagtctagtgcaaaatgcttctactctctgtgtcttcctgatagggatgtttaatgtaagtaggatattaatttcagaacattgatttcttatctgtgtgtctgacgtgccatctttaatgttaaaattaaggtgttaaaattaagcctagttatatagacgaaataaaatgctaagtcactacaaaaaaaaaaaaaaaaaaaaaaaaa

SEQ ID NO: 7058 - DNA, 6358 bp, Homo Sapiens
  NM_207306
gtggatccctagatgggagccggggatgggccgggtgcctggtgggtggcagtcggggctgacggcggcggcactttgccgcctcaggccctggacaccttcaccccgccgcctgcccaggcgggccggccctgcccgtccaccggccgccgagagtccccggccttgggtccccggggccgctgactggcctcggtcacctcccggggaaggctcccgcgcctccatctgcccccgcaggaagggaccctcttctcgcccgcgaggcttctccgggtgggatcgtcctggcccccagccctaagggatccgccccctccgagcatccgccgcccctcggagaccactccagctcggacggacccactccagcccccgctgcacgcggaagcgctcatcctccccgcctgccccgttccctcccccttctcctgtgggacaaccagggaccgcagctccccgctccccaggtgtgggggctccgacacgaacgcctctgctcgcagggcggtgagcgcagatcccacgggtccctcggtcgggggtcgaggctgcttccgtttccatcccggacccgacaatgggcgggaaaaagaaggctttacacgactacgcggcggagttcaccgacctggtggtgaagcacctgattgagcacagtgactctggggacacgtctgtggtggagaccctttactgcagggcctgcgagctgcccgtgcgcgtgcggagggaccgcatcctggaacacctgtcctcgggcaggcagcacggcctgcggacgcccattctcatgtaaatgtcagtgccaacgctggtgtttcaggagtcatcccagcgggctgcgggctattttaggattctctgccctgcaaacgtttccaaagtacgtggacaggccgcctgatgacactacgtttacgggatctgctagtggcttgcctacttagggagtaaaccctgtgaagtctcgcagttttgttaaagtgtgcgtggccacctgaatgctgccttatcacaagccagatacatactggtctgtagggtaactccccactgttgatcctctgagatgattgtggactgggtgctgtgagtcctgccactttgtttaagtgaatgtgtcttttgtccagctcagccgcctcggatctcgctgccaccagccttactgcacacccgtgccacccgcccttgccccgtcagcctcagcctcagctcattctctcaggcagtcccagcattggcacggtacctcctcccgctgtgggccacacgtctctgctccctgtcaaccctcctgccatcagcaccaccaccagcgacttgtctgcccgggaggatgcaacaccatctgcctccaccggccacctttcagtgtttcctgctttccaagtaaagataccagcagtgccctcagagcagaccagccagagtttttctgaagcctcccacagggtgctccccggaggaggcccgagatgctctcgtgactttggagccggggtggctggccaccttggcctgggcatctttggggtgggcttcgggagcccggcactgctgcagagtgtggtggatgagaacagctgctgcttgctgtacgtggtggaggaccagctgtgtgatgtggagcaagccttcagagctgagcatttgggccaacaccagagtggttcgggaacaggatgcagacattgtcctcaacgaccagcggcactttgatccggttttccagttcttgcacaagcaagtttgtgtcagccacgccctggggaggatccactggatcaccgccgtcactgcctgttcccggcggcctctccggcttccctaaagagagcaggtgggactttctacaacgctgctgtgcacgacgtggatgccgtatgcatgttgctgggggaagccactccggacactgtgttttctctgggacatgtcttctgcccagatatggccgccttaaaagatgcagatgctgttgtgatcagcatgaagtttccctgtgaggccgtggttagcgtggacatcagccagcactgcacagacagctgcgaccaggacgtcagccagcactgcacagacagctgcgaccagagactggaggtgacccttgcccttttccacccttcgccagtccactgtgaaaagctgggttgattgtgcgggttagatagaggtcatcagccgggttgattgtgtgggttagacagaggtcatcagccaggttgattgtgtgggttagatagagatcatcagcctggtagattgtgtgggttagatagaggtcatcagccaggttgattgtgcgggttagatagagatcatcagccgggttgattctacaggttagatagaggtcgtcagccgggttgattgtgcgggttagatagagatcatcagccgggttgattgtgcgggttagatagaggtcatcagctgggttgattgtgtgggttagatagagatcatcagctgggttgattgtgtgggttagatagaggtcgtcagctgggttgattgtgcgggttagatagaggtcatcagccgggttgattctacaggttagatagaggtcatcagctgggttgattgtgcgggttagagatcatcagccgggttgattgtgcgggttagatagaggtcatcagccgggttgattgtgcgggttagatagagatcatcagctgggttgattctgcaggttagatagaggtcatcagctgggttgactatgtgggttagatagaggtcgtcagccgggttgattgtgtgggttagacagaggtcatcagctgggttgattctgcgggttagatagaggtcatcagctgggttgattgtgtgggttagatagagatcatcagctgggttgattgtgtgggttagatagaggtcatcagctgggttgattgtgtgggttagatagaggtcatcagctgggttgattgtgtgggttagatagaggtcatcagctgggttgattgtgtgggttagatagaggtcatcagctgggttgattgtatgggttagatagaggtcatcagctgggttgattgtacgggttagatagaggtcgtcagccgggttgattccgcaggttagatagaggtcgttagctgggtgtgtgggtcccaaggcgtgctgcagatggagaatcagaattccttgggcatcaccgggcggggcatgtccctgtcccttcgctcccagacccaggctagccgctaccaggactcctatcgagagctcttcagacactttgtcagaacccttaaaggtgggtgacgttttcaggaggaacctgggatgtcctgatgctcaatgggtagatgccttccaggctgcagtcagtgcagatgatatgccaatttcaggtggaaaattgcattccagataccgggttcagatttgaaattgtccatctcagtgatcatttacgttgcgtgtacttgagggagattctgagagatgctcctttggggttctgtgcgtgtaccatgttgcctgacacgtcctgagaaatcttcttaaactctgagtttataaaataactacttctgaactcctgagatctagtggataccatgtatcctggaagataggacactttctaccctctgtcagtcctgggggtgactgggaaccagagaggttgagcagaattcctggacctgggtggggcttgtccaagaggggcaggtgggcctctctaggatcagtgtcccacccagaggccagtggccccttcacatgccccaacaagaggaagactgtctggctccgcagtgttgggttttgtcctgaatctgtgcaaatgtgcagggaaataacctcctgaaatcaccaaagagcagttcctcagggccttccgggtgaccgtggccgtggagcagtcgtggtgaaaccggtcagctgtggacctgccctgcgaatcggcagaggcctccgtggtgaagacagaagctccgtgaaccaactcgaggctggagccaagatcctgcctgatatccagttgcctgtttcacttgttactgttactgggagagggagacaaaacctcatggcaatcttgtcctcactggagactcagaaggggaagcattgggaaaccatgtatgtttcatttctggtttaaccaggcttttcaggatgggacttcagaccaaggacacaagttgggcttgcttaggtgttttgtgttgtgcgcaggcctcagagatgctcttccggtcagagttcccttggcagggccttggaggcctctggttggctctctcaggaagagggcaggtcagggattgggcggtgtaaattgactcagaaacctgcggtttcagcttttctgtggcaaacagggccgagggctggtgaagctgttaaggctaaatgtcgcatgcatgaggcgggctgcaggcctccttaggccttttttggggtaattacaccagtatttaaaaacatttttttttgtttgttttgagatggagtcttgccctgtcacccaggctggagtgcaatggtgcgatctcggctcactgcaacctccgtctcccaggttcaagcgattcttctgcctcagccttctgagtagctgggattacacgcgtgtgccaccacgctcggctaatttttgtatttttagtagagatgggatttcaccatgttggccaggctggtctcgaactactgacctcgtgatccacctgccatggcctcccaaagtgctgggattacaggcgtgagccaccatgctcggcctaaaaaacaattttcttgaagaatccgattttgtgcatagtaatgacacagcaccattcctgagaaataggaaatatatgtgtgtggtatgaaaagcccatattctgttcttgtcacctgaatctaggcttcctctttggatgtgaacgcgggaatgaacagtggctgttttccacccaaaggggcgtggagaccttttggaaacgggctttctcctttccattttgcagccgggggcgggtggaaaccttccttcgaagggtagtgccttggggagcagcagacctgctctgagtccagcttagctttccaaaattctgtgtggaacttactggagatgtttttatatatttgaaaataatggcctgtatttctcacgctatacttaaaaaaaataactaaccttttaaacaaagatattcaaactcacccttgtgctgaaagcactcacatttctgtgttcattcctgaaagggcgttttagagtccccgtttctacgttctatgtggcaccctcttgccgagggaacatccagaatccctccacttcctgtctagtttgaggcctcaacaccttcatgatccagagtcctgcggctatgagggggtgggcccaccaccgcccagccctccttggtggacgtggggacaggtaggagcctagggaaaggggtgggcgggctctggtgtgacggcgtgagcgctagccaggaagatggggccagggcttggcatggcacctcacctgtgggggaactcggcggagcttcctggcggcatctccccctcttgccttggtcctttctatctttgttttaggccaatttctaaaaagactgaggcctccttcaaggttgaacagatttctagagccttgtttttgctgtgacaagtccctagtccctgttcacaactctgaaaccaagaaacctgagaaccaagagaactgaaatgaagcccgttggtctcagcctggcttgagccaacatgaggctctctgctgccttttgttttcttaggttttgctgagaaacgggagtgcgttctgtgtcggtgtttgtgacgccctgagaccctgcttggcctagctaaagtccagaaggcctgggccccacagggcttggatgagggctcatgggcctgtacttcaggaggcctgagaggcccggtcagtcccatgaggctactcggcttggcccgcaggtcctccgaggcacagggcagagggacaccccagggacccatcagactcacgacacagagaaactcaagtggggtgccagggccggccacagaggccacgggcttcctgcctgtgaggagccgccctgtttgtctgagccctttggagatttaggttgagtcatgagaaccggtcattggaacatacactttattatgttacaaaaacaaaaatccccactgaaacacagctaaaaaaataacacattttcccaagattacattaccaaaaacagttgttatgtcattggagggcgtccattaatactgctcggagaagcacgatcttacacgaaaaacacggatgggatttcgttttcaccttaaagcattaaagtgctttaactggtaa

SEQ ID NO: 7059 - DNA, 3401 bp, Homo Sapiens
  NM_207309
cgagtgccgacttgacagacggcagcggcgacatggcttcggagcaggacgtgcgcgcccggctgcagcgcgctggccaggagcacctcctgcgcttctgggccgagctggcgccggagccacgagccgcgctgctggcggagctggcgctgctggagcccgaggcgctgcgcgagcactgccggcgggcggcggaggcctgcgcgcgcccccacggcccgccgcccgacttggccgcgcgcctgcggcccctgcccccagagcgcgtgggcagggccagccgcagcgaccccgagacacggcggcgctgggaggaggaaggtttccgtcagatttctctgaacaaggtggccgtcctgctgctggctggggggcagggcactcgcctgggcgtgacctaccccaagggtatgtaccgtgtggggctgcccagccggaagaccctgtaccagctgcaggcggagcggattcggcgggtggagcagctggccggtgagcgccacgggacccgctgcaccgtcccctggtacgtcatgaccagcgagttcactctggggcccacggccgagttcttcagggagcacaacttcttccacctggaccccgccaacgtggtcatgtttgagcagcgcctgctgcctgctgtgacctttgatggcaaggttatcctggagcggaaagacaaagttgccatggccccagacggcaacgggggcctctactgcgcgctggaggaccacaagatcctggaggacatggagcgccggggagtggagtttgtgcacgtgtactgtgtggacaacatcctggtgcggctggcggaccctgtcttcatcggcttctgtgtgttgcagggcgcagactgtggcgccaaggtggtggaaaaggcataccccgaggagcccgtgggcgtggtgtgccaggtggacggtgtcccccaggtggtggagtacagcgagatcagtcctgagaccgcacagctacgtgcctccgacgggagcctgctgtacaatgcaggcaacatctgcaaccacttcttcacccgaggcttccttaaggcggtcaccagggagtttgagcctttgctgaagccacacgtggctgtgaagaaggtcccgtatgtggatgaggaggggaatctggtaaagccgctaaaaccgaacgggataaagatggagaagtttgtgtttgatgtgttccggtttgctaagaactttgctgccttggaagtgctgcgggaggaggaattttccccactgaagaacgcagagccagccgacagggacagtccccgcaccgctcgccaggccctgctcacccagcactaccggtgggctctgcgggccggggcccgcttcctggatgcccatggggcctggctcccagagctgcccagcttgcccccaaatggagaccctccggccatctgtgagatatcgcccttggtgtcttactctggagagggtttagaagtgtacctgcaaggccgggagttccagtccccgctcatcctggatgaagaccaggccagggagccgcagctgcaggagtcctgacccgcccagactgtccccagactcccccgagacctgccagccccggcatcctggaagtcccgactccccccagacctgccagccccggcgtcctggagctgggggctacagcccagcctgagctctgggtgggaaagcagcctgccccatgcttccagcctgcagaacacagaatgaaacatgctggtagactccacgagggcagggcctctcctgtcgcctctggacacaagtggcgacagcctgctgggggctctgtggctccattcctggctgtggggtctagtcaagaggcagagggacttgggacctgggagaatggggctgagaggaggcttcgggttggggcccaagggaggtgtggtgtcatctggggagaacaggagggcatgtccctttgggagcccgccttgtggatccaccacaccccaccgagcactagaagctgcataagctacacaggatgtgcttctgcagcctacagatgcagaaccagaatgagggggacaattccacccactcgagggctgccccctcttccttagcagacgaaccagtaatgggggcaaggctggggcatcccagcccacacaccctggatgcccagcaaggccacagaaagagcctgatgtccatgatccaggtggctctgagaagcttggcctggacacctgagcctgcggccggtactcctgccttctccccatctatccccaaggcctctgcctctcagcctcttccatggtcggtttaggctgctgagttttctgtgcttccccaagaaccagtgggatcaatgccggcggcctctgtgatggttgctgactaatccgggatttcatgagtcagaggcaccacccctcaccccagctgcctgctgcttctgacggatcttggtgctcaggctgcctggctctccgagtgaggacgcagcctccatatttggtgcactcaggcatggctgggacaagccagctgccccagggttcttcccctggtgattctcgcctgctttctcatctcaggggaggcagtggcacctccctctccctgctgacatgaagagagctatgatatgccactgctgccaactcatcctctgcccccacctcgaaacccacagtccccagtggagggccactactcatccccattggtttcccaggggaggggtgttgtctggaagggcaggttcagatgcagccttccagatttagaggcactgggaggacagtggctgagtggaggcgcccagacctgggcaggcagcaggctcaggcccacaccttgtgatttttgaaaccaaagcccagaagatgatgtttacttctctctccctggctctgcccttcttactgcaaaccatgctgtgccttagggcccttctcatagctgttcctcatggccatgactggaacagggatgcaacctctttctacacaagcacagttagttgggtgaagtctttttttttgtttgttttagacggagtttcactcttgttgcccaggctggagtgaagtggcgtgaccttggctcactgcaacctccaggccagcctcagcctccctagtagctgggactacaggcacccactaccacgcctggctaattctttgtatttttagtagagatggggtttgaccgtgttagccaggatggtctcgatctcctgacctcgtgatccacccacctcggcctcccaaagtgctgggattataggtgtgagccaccgcgccgggccggttgctggcatcttaatgttctgtaggtggaatatttccaataaacacaaggtgccgtaattgaaaaaaaaaaaaaaaaaaaaaaaaaaaaaaaaaaaaa

SEQ ID NO: 7060 - DNA, 6044 bp, Homo Sapiens
  NM_207325
ggaaggaccaagtttgcggagcggcttctgctcgtcggccgtgcggcgaggcagggcctgggctgcgaccccggcggccgctcgcggtcttgggagagctggggcgcgtgcctgaacttcccggctgcccctgtccttggagacctacctgatggggacgccaggtgtgcaggggcgtggcgcgtaggagtgatttggagaacaatgcatgtaagtctgacatcatgatgtccatccggcaaagaagagaaataagagccacagaagtttctgaagactttccagcccaagaagaaaatgtgaagttggaaaataaattgccatctggttgtaccagtagaagattatggaagattttgtcattgacaattggtggaaccattgccctttgcattggacttcttacatctgtctaccttgccacgttacatgaaaatgatttatggttttctaatattaaggaagtggagcgagaaatctcattcagaacagagtgtggcctgtattactcctactacaagcagatgctgcaggctccaaccctcgtgcaaggttttcatggcctaatatatgataataaaactgaatctatgaagacaattaacctccttcagcgaatgaatatttaccaagaggtttttctcagtattttatatagagttctacccatacagaaatatttagagccagtttatttttatatttacaccttatttgggctccaggcgatctatgtcacagctctctacataaccagctggctactcagtggtacatggctgtcaggactgttggcagctttctggtatgtcacaaatagaatagataccacaagagttgagtttaccatcccactgagggagaactgggcgctgccattctttgcaattcagatagcagcaattacatatttcctgagaccaaacttacagcctctttctgaaaggctgacacttcttgccattttcatatcaacttttctctttagtctgacatggcaatttaatcaatttatgatgctgatgcaagcattagtgctgttcacactggactccctggacatgctgccagcagtgaaggcgacatggctgtatggaatacagataacaagtttactcctggtctgcattcttcagttttttaattccatgattcttggatcactgcttatcagttttaacctttcagtattcattgcaagaaaacttcagaaaaatctgaaaactggaagcttccttaataggcttgggaaacttttgttacatttatttatggttttatgtttgacactttttctcaacaacataattaagaaaattcttaacctgaagtcagatgaacacatatttaaatttctgaaggcaaaatttgggcttggagcaacaagggattttgatgcaaatctctatctgtgtgaagaagcttttggcctcctgccttttaatacatttggaaggctttcagatactctgcttttttatgcttacatattcgttctgtccatcacagtgattgtagcattcgttgttgcctttcataatctcagtgattctacaaatcaacaatccgtgggtaaaatggaaaaaggcacagttgacctgaaaccagaaactgcctacaacttaatacataccattctgtttggattcttggcattgagtacaatgagaatgaagtacctctggacgtcacacatgtgtgtgttcgcatcattcggcctatgtagccctgaaatatgggagttacttctgaagtcagtccatctttataacccaaagaggatatgtataatgcgatattcagtaccgatattaatactgctgtatctatgctataagttctggccaggaatgatggatgaactctccgagttgagagaattctatgatccagatacagtggagctgatgaactggattaactctaacactccaagaaaggctgtgtttgcgggaagcatgcagttgctggccggagtcaagctgtgcacgggaaggaccctaaccaaccacccgcactatgaagacagcagcctgagagagcggaccagagcggtttatcagatatatgccaagagggcaccagaggaagtgcatgccctcctaaggtccttcggcactgactacgtaatcctggaagacagcatctgctacgagcggaggcaccgccggggctgccgactccgggacctgctggacattgccaacggccacatgatggatggcccaggagagaatgatcctgatttgaaacctgcagaccaccctcgcttctgtgaagagatcaaaagaaacctgcctccctacgtggcctacttcaccagagtgttccagaacaaaaccttccacgtttacaagctgtccagaaacaagtagcgcagatttctgcccagtgtctatttttgatacggagaaactgcatcatgatgaaactcaatagatgacgtttcctatgtaagtaggtagcccaaaccttcaagctgtgatatgagtaagttctacagatgtttacacaagtgttgccatctttgaaagcatcttctacaagcagaagtctttttcgttgtgtgtctatctttctcattaatgttctttagcctaaatgttaacaactttctaagagtgacctagaattatgttgttggagagaatgatgtgtgttccatggatacctggataggcacataacatgttggaagatgagcacctgctcaggatttgaaatacgtttaattttcaggtgacttaagacagctatgattgaatcaactagagatgatgatcgacttatttaatatgatttcactggtgaagaccaattggtagctttttaaaaagcactttagtgtcctgttttaccttaaaatgttataatattttccagttgtcatgctgtcaacattaacaaaaaaaatcatgttaaggctttgtatcaaacattttgttacactctgtctgaaatgtaatgtggagtacttcagcagtatgtgtcatgtattgtgtgtgtctgtgtgtgtgcatgtgcacacatgtgttttaatgctgggcacagaaaagtgttacaagttccatatcgtaagtccttaaaggggcagaaatatatgtagccaagtagaatttattacattttagtgttattattttaaaacttactgatactctttaacctctcctgcagtaatagttttgctttatttcttactcatttcaatttattgggtttgcaaaattttgtaaactttttgtgtttttagcctttgtattttttacagcctagaatcttgcaaagtctgaatattttttaaatgttctatcttaactagttcactaatacagtatttttagcagacagcattttcagacagcattttcataccaagtttgacttgtggtctccaatcttactgggaaggccctggtagtgtaattcttttccttattaaaaggtaaccaagtgcctctaagtcatgcttatttgtaaacaacaaagaagagtatatgtacctgctcaaaatttttttgataatcgcttatataattaatttctaatgatgaggacatgtaaaagttgccagtaagaacatagtatgcatttaattaaatcaagatggctaatggaattaactttctcccctgttcttgccaggtggaaatgatttaagcatttctccttgcagttgtattgaagtaaattaccataggcatcaagatggctgcatcacattttcaaatgattttatattcagttgctacttataaagcagcattcaaaaagtcttttacactgtcatgttggacacaagcagactcagcttttatcaaaacttgtttaaataaaaaattgacagtagctgggttattaaattatgcaactgaaactcctgaattatatcttttctgtatcccttaataagattggagaccactgccgtttaggataatacaataataaaacgttttaatcagtactaaaactttaattaagccaataatgatgcatgcctgttgtagctgacagcatgggtcagtacatccttcagcgagtgccttactctaattgaaaccaagcacacgtaaggtacaatatgttagactctgtgattttgttttcaaaatcctctgttatggctatatttaaatttattttaaatattcctgtatgtattcatctaagcatttgggcatttggagtcttaatatacaagaaacacgtacttaaatttttatgcttatcaccgcaatgatggcaaacagtgattttttttttcatagtttaggtgtcattgttgccagcacctttagtgctcagtcttcagtgaaaaatataaagtgccaaaaaaatcttgcaagacagaatccatacttaacactctttccaagacactgtgaccatgtacagtagctatttcctgatgaccaaatctctcaacgaatcatgttattaataaatatttttagcactcatcagtattctccaatgtgaccttctcattggagtacacagaaggaaagcaaagaagagcatctgacttctagctctggcttacagcctctctaccaggccgaagcaagagacccgcggcagcagctccccgccactcagacctgggtggtgataacctcaaagaatggctctgttttctattgacagaaaacccacttgattttgcttctgagttagcagtcagaagaccctctaagtacaatagaagtgctcttaacggactctgcctgtgtgactcccaggccccggagtctccatctctctcgtaagccacctgccacagcacagctggaggctgttctctggtgttctcagcgctccggctccctccctggagttgtgcacccgtcccaaactcctccatgcaagttctgcttcctcttataagtacacaactcagttaagtattcacatacacacagaaaatacgggtgtgaaaagaaagaattttctgtaaaaattaagttgaatactttggtaaaaagtgataaaggctgagttgccaataaaagttgcttttaaattaggtgtggctgggaatattataagatattggggaaaatatacaaatcaagaaaatttctgagcttagattgcttcatagatttatttaagtactcatcccacctttaaaacctctaaactgagaagaagggacccaaatcatgttattggtgtgatttatgtgagaagtagaactgtagtcattggacccttaggcaaaggaaaatccgtgtctttatatcagaagatcggcaaacgaatgtatattacacagtttaggttatgattccctactttaacctacttactttattaaatgaccaactactgatactgatcacaatagttattagagattctaatttagttggaaggttctaatcactttcattacaggcatttgaaaaatagggattcatttcgaatatattagccaggagcatagttagatgttacccaggccatttatcatcctgttaatgatgattttcccgacccttgtgagatcagcgtgacaggagtgtgtgtgtgtgtgtgtgtttctgtgggtgtgtggttttggttgggtgctgccaggtggcaaaggcatatgtaaatacatctgatctgcatctttatttcacagttaactaaaagtaaaaatgtctattctgattccatattgattttgtctaagatgtaaaaatttgagttcatctttggccaaaacctacctgaattaacatacaaaatatttgatttttaaaatttaattcaaatctcaaaatcaattaagtattctcagatcctatatcttggttaatatgctcccagatactttaaacatggcaaccttttggcctaagagaatgtttgttcatggaaaaaagcttttgagatgagagggtgtcttactttcttgtggcaattgattttctgttttaacaccctttgggtaaaatcttgcaaagagcttttataatttgttttactgaattgtatggagattgtataccaagtaaagctcttttaaattacataaaaaaaaaaaaaaaaaa

SEQ ID NO: 7061 - DNA, 1502 bp, Homo Sapiens
  NM_207327
ctcaggcgccttggacgcggagccgtgggacgagggcggcgatggcgtcccatgtagagtgccgtcctctgggagtgtttgagtgtgaactctgtaccttgacagctccgtacagctatgtgggacagaagccccccaacacccagtcgatggtcctcctggaggaaagctatgtcatgaaggatcccttcacctccgacaaggacagattcctggtcctcggctcgtgctgcagtttgtgcagcaggctggtgtgtgtgggcccggaatgcagtttattctactccaagagattctgcctcccttgtgtccgggagaacatcaatgcttttcctcaggaaattcggcaagacttggagaaaaggaaagctccatcaaagaggacccccagccagcccggttctcggacgtgagtgcaactggggctaggtcatcgggcggcaccctgcacagagctcctgggccagcctgcgccagggatgctgctgagctgggagccgccatgcctggccttgtttctggaccactgggagcagcactgcagcccaggggagctggagtccagcttggagcagccacaggcccagggagctgtagcaagagggtagtccaaaggcagatgccagacaagacacagccaggaacccggccaggtccccccacatgcccctcagggcccaggcctgagtgagtgctgctcagatgtgactgagagggatgacctccttcagcagggcagctcctaagaggctgcgtgcaggtgcgtgtggggggagatgccacactgtgtcggggccatggtgcactgtaggtggctgcaatggtctctctgtaaggaaaatcactgacagcagctccttctggacccagtctggaaggtctagagggggatagaatttttatttcatatccttatgtggtgcttggaaaatgtttttaaccttgaccatgtattatgtttataattaaaaacccaaagaaccagctcatgtttggaaaaggaatcttccactgaaacatttggatacccgacgttctccctggacacttggcccggcaatagttggggtctcctgggaagctgagtgctggcttctagcctctccagttccctcagactctgtcttcagctcgggcccctccgttctgtctccctcgactccaagtcaggaataccgtgggcttcctgccctcaccccacacctcaagaccatcccactgcttgcctgcttgccccctgccatctcgcactcagccctgggtgcctgtgaagcctggccccactgcctgccgggggttcctgcagcacccccctactccaggctccccatctccctgaagcttccagggtagcagctggtgggacactgatctgtgagctctggaatgtctgcttagaattctgagaggcaggaactgctctgtctttgtaactactcaaggccaactgtcacatgaaggaatgaataaagagtttttactgacttgtgcaaaaaaaaaaa

SEQ ID NO: 7062 - DNA, 5763 bp, Homo Sapiens
  NM_207331
gcgcaaggcacctgctggcaatggcaggaggcggacgtggggggtcgtgcagtaggtactggagggagagacgtgggcacaaaggtcgcgggaggaacaggtgcccacaatggctgcatatttgcccgtggatcactgaagattcctgctctcctgctgaggtggagactgcagtgagctgagatcgcaccattgcactccagcctgggcaacgagtgcaaaactcagtctccagataaaaaaaagaaaaagaaaaaaaagaggccgggtgtggtggcttatgcctatgatcctagcactttgggaggtcggggtggacggatcacgagatcaggagttggaggccagcctggccaacatagtgaaagcccgtctctagtaaaaatacaaaatttagtcagacatggtgggcaggagagagcatgtgcaggggaacatccatttataaaaccatcagacctcatgagacttattcactaccatgagaacagcatgggggaaactgcctccatgattcagttatctccacctggccccacccttgacacatgggaattgttacaattcaagatgagatttgggtgcggacagagccaaaccatataattcttccccggcccctcccaaatctcatgtcctcatatttcaaaagcaatcatgccttcccctaagtcccccaaactcttatttcagcattaactcaaaattccatagtccaaagtctcatctgagacaaggcaagtcccttccacctatgagcctgtaaaatcaaaagcaagttagttattttctagatacacagggatacaggcattgggtaaatacactcgtttcaaatgggagaaattggccaaagcgaaagagctacaggccccatgcaagtccaaaacccagcaggcaaatcttaaagctccaaaatgacctcctttgactccatgtgtcacatctaggtgatgcaagaagtgggttcccagggtcttgggcagccccgcccctgtggctttgcagggtacagccccccttctggctgcattgagtgtctgcagcttttccaggcacacagtgcaagctgtcagtggatctaccattctggggtctggaggatggtggcccttttctcacagctctgcttggcagtaccccagtggggactctgtgtgggagctccaaccccatatttccctttgacactgtcctagcagaggttatccatgagggcccccccctcccctcccccccacagcaaacttttgcctggatttccaggcattttcatacatcttctgaaatgtaggcggaggttcatgaacgttaattcttgactttggtgcatctgcaggcttaacaccacctagaacctgaaaggcttggaacttgcaccctctgaagccatggcctgaggtgtaccttggccccttttacctatggcaggagcagctgggatgcagggccccaagttcctaggctgcacacagcagggggttctggacccacaaaaccatttttccttctaagcctcctggcctgtgatgggagggtctgctgtgagggtctctaacatgccctggagacatttgccccattgtcttggtgattaacatttggctcctcattacttatgcaaatttctacaacccagtctcctgagaaaatagatttttcttttctgttgcatcatcaggctacaaattttctgaacttttatgctctgcttcttctcgaatgctttgctgcttagaaatttcttctgtcagataccttcaatcatctctctcaagttcaaagttccacagatctgtagggaactctagaaagaaattcttattttccctctttcccgcctatcttatgcccgtttctaatacaggtgcacaatgcctgcagtgtctttgcatagtaagagtgactttactccatttcccaacaaattcctcatctccctctgagaccacctccgcctggaccttgttgtccatatcactattaacattttggtcaaagccattcaacaagtctctaggaagttccaaactttcccacattttcctatcctcttctgagccttccaaactgttccagcctctccctgttacccatttccaaagttgcttccacattttcgggtatctttacagcagcaccccactctactggtatcaacttattgtattagtctgttctcacaccgcaaataaagacatacctgagactgggtaatttataaaggaaagaggttgaattgactcacagttctgcatggctggggaggcctcacaatcatggtggaaggcaaggaggtgcaaaagcatgtctcacatagtggcaggcaggagagagcatgtgcaggggagctcccatttataaaaccatcagatctcatgagacttagtcactaccgcgagaacagtatggggggaaccatccccatgattcagttatctgcacccggccccacccttgacacgtgggaattattacaatgcaagggctggtgaattaccagatctccgtcaagtgcagtaaccagttcaagttggaagtgtgtcttttgaatgcagaaaacaaagtcgtggacaaccaggctgggacccagggccagctgaaggtgctgggtgccaacctctggtggccgtacctgatgcacgaacaccccgcctacctgtactcgtgggaggatggtgattgctcacaccaaagccttggacccctcccagcctgtgacctttgtgaccaactccacctacgcagcagacaagggggctctgtatgtggatgtgatccgtgtgaacagctactactcttggtatcgcaactacgggcacctggagttgattcagctgcagctggccgcccagtttgagaattggtgtaagacatcacaatcccattattcagagcgcgtatggagtggaaacgcttgtagggtttcaccaggatccacctctgatgttcagtgaagaggaccggaaaagtctgctagagcagtaccatctgggtctggatcaaaaacgcagaaaatacgtggttggagagctcatctggaattttgccgatttcatgactaaccagtccaaggatgaaggaaaaactggacctcattatggatttacttttgggatacactcattattccagaggagggtaaaaggctgagaagcttaagacttgctataattctgtgagagagctataaaagtctgctcagaaacattataacgtaaaatggacagagaaggacaatgagatatttaatttgccacggcaaagccattgctgtgaagaatggataatatatgtcaatggtaatatatgaagaaataacacagatggagctggcttgaaatcctcttgtttatggcagtacatatcgtttatgattcaaaaaatatagcccatttccaaaaacctgcaacaaagagatactttctcaggtgtcagtttcttggtcgggaatgaaaatagtgccaacctgtgataccttcactctaattttactttctgaggaagttttctgtaatagttatttggtgataattattaatactggtgagaaaatcaatgtaaaagaggagaaataacccacacaaccacatacaactaggaaatgatagatggatctgaaaaaaaaggatatgcactcttaacaagttcaacacccaagtactattgcaagtaccagctgtatttcatggaaaaaaaaaaaagaataactcaaaaggcagaacgaagagcctagaggtcagagatgagaggcatgaataattattcacaggcgttgaatataatcaaatgacttgcaacatttaccactgggattttaaaatgtggtggaccaatcattcttttagtctgtgcattttcccatttttttcaacaggaatgtctagagacattattcctgttttgccactgtatttttggtgaatgtgtagtaagtaactggcctctttagtatcacaaagctggatgaagaaaatgtggtacatatacaccatgaaatactatgccgccacaaaaaggaaatgagatcatgtcctctgcagggacatggatgaagctggaagccattatccttagcaaagtaacgcaggaacagaaaaccaaacaccacatgttgtctcttagaagtgggagctgaacgatgggctttgcagagattaaagcttcagaaaaaaatatgggaaaatatgttaaaatgttgacctgaaaatgaagtggatgactataaaactcttgagagaattagactttttgtagcagtttattacatgataataccttaaaggagatcacattcagtgacctgcgttgacagatgtgaatttcttcggagtaagaaatcctcagaggaaattacccagtatattcaaagctacaagggatttgttgacataacggtaatgtataacagcaatttttttctcaagtttttggattacctgtaagtgtctgactcagaagggcataggcattctttttatgtcatgggtttgatttctttcttcctttctcctttcattcccctggctcccatcttcaaagtgaaaaatatcacattcacttgctgacctagagcctttttctttttccagggctggcttctgacgggctctgcttgccttcctgatagtcttcccctttatgaatgaagccacttgccccagcttccctctgctgcccctatctgcaggcttgctaagatctcctgacctaggcgctgtcacccacagtgggctgcagagctggctcttcctagctggctaactatcctgaatcagtaaaaatttcctagtggagagtgatgggaaatcgaatccaaactggcttaaacaaaaatgagaatttattgattaacatgactcaggagaccagaactctatagagaacatggcctgacagtgggggaagagaggtgtttcctcaaaaagaaactgggtgcagctttcccagaagaatcagttgctcaatatataataccctgatgaatttagttaccattctatgtctcttacttcctcattcgtcaaagtacatctgtgatatttaaatgcaggtctgttttcaaggtcagtttccggaaacagtgaccctgagaaggcttcctcctgagtatgcataaacattcacagcttgcatgcgtgtgtgtgtgtgtgtgtgtgtgtgtgtgtatgtttgcttgcactgcataaaaacaattgcaacatcaacagaaataaaaattaaaggaataattctcctccgactctgccgttccatccagtgaaactcttcattctggggtaaagttccttcagttcttgttcatagataggtatatacttcataagtcaaacaatcaggctgggcgcagtagctcatgcctgtaatcccagccctttgggaggccgagctgggcagatcacttgagatcaggtgttcgagaccagcctcaagacctccaacatgggccgggtgcagtggctcacgtctgtaatcccagcactttgggaggccgagacggacggatgatgaggtcaggagatagagaccatcctggctaacatggtgaaaccccatctctactaaaaatacaaaaaaaaaaaaaaattagcccggcatggtggcaggcgcctgtggtcccagctactcgggaggctgaggcaggagaatggcgtgaacctgggaggcagagcttgtagtgagccaagtgccactgtgctccagcctggacgacagagcgagactctgtctcaaaaaaaaaaaaaaagaaaaaaaaaaaaaaaa

SEQ ID NO: 7063 - DNA, 6145 bp, Homo Sapiens
  NM_207333
agtctcactctgtccttcaggctgtgagtgcagtctcctgatcttggctcactgcaacctctgtctcctgggttcaagtgattcttgtgcctcagcctaccaagtagctgagatacaggattgacttctaaagactcttggtacctgaggaagaaacccagaagaggaagaggaaagcaaaggagtcggggatggctctttctcagggtctactgacattcagggatgtggccatagaattctctcaggaggagtggaaatgcctggaccctgctcagaggactctatacagagacgtgatgctggagaattataggaacctggtctccctggatatctcttccaaatgcatgatgaatacattgtcatcaacagggcaaggcaatacagaagtgatccacacagggacattgcagagacaagcaagttatcacattggagcattttgctcccaggaaattgagaaagacattcatgactttgtgtttcagtggcaagaagatgaaacaaatgaccatgaagcacccatgacagaaataaaaaagttgactagtagtacagaccgatatgatcaaaggcatgctggaaacaagcctattaaaggtcagcttgaatcaagatttcatttgcatttgcgaagacataggagaattcatactggagagaaaccttacaaatgtgaagaatgtgagaaagttttcagttgcaaatcacatcttgaaatacataggataattcatactggagagaaaccatacaaatgtaaggtttgcgacaaggcttttaagcatgattcacacctggcaaaacatactagaattcacaggggagacaaacattacacatgtaatgaatgtggcaaggtttttgatcaaaaagcaacccttgcatgtcatcatagaagtcatactggagagaaaccttataagtgtaatgagtgtggcaagacctttagtcagacatcacaccttgtgtaccatcatagactgcatactggagagaaaccttacaaatgtaatgagtgtggcaagaccttcgctcgaaattcagtcctcgtaattcataaggcagttcatactgcagagaaaccctataagtgtaatgaatgtggcaaggtttttaagcaacgagcaactcttgcaggacatcgtagagttcacactggagagaaaccttacagatgtgaagaatgcgacaaagttttcagtcgcaaatcacatcttgaaagacataggaggattcatactggagagaaaccatacaaatgtaaggtttgtgacaaggctttccggagtgattcacgtcttgcagaacatcagagagttcatactggagagagaccttacacatgtaatgaatgtggcaaggtttttagtacaaaagcgtacctcgcatgtcatcaaaaacttcatactggagagaaactttacgaatgtgaagaatgtgacaaagtttacattcgcaaatcacaccttgaaagacataggaggattcatacaggagagaaacctcacaagtgtggtgattgtggtaaagcctttaattcaccttcacaccttattaggcatcagagaatccatactggacagaaatcttacaaatgtcatcagtgtggcaaggtctttagtctgaggtcactccttgcagaacatcagaaaattccttttggagacaattgtttcaagtgcaatgagtatagcaaaccatcaagcattaattgacatcagagtcaaatcagcattgacctgagtttgagttgacttaacattgatttcaagcattaatcgacattaaactgtttatgttaagaggattgggccaggcgtggtgtctcacacctgtaatcccagcactttgagaggccaagacaggtaggtcacttgaggtcatgaatttgagaccagcctggccaacagacgggagccacttttcccagcctgtatgttcttttatttatttatttatttttaagatggaatcttgctctgtcgcccacgttggagtgcagtgatgtgatctcggttcactgcaacattcacctcccaggttcatgcaattctcctgcctcagtctcctgagtagctgggactacaggtgcgtgccaccatgcccgggtaattttttgtatttttagtagagactgggtttcaccgtgttagctaggatggtctcgatcttctgtccttaaaatccacctgcctccacctgccaaagtgctgagattacaggcgtgagccaccacacctggcctgttttttgtttctttaacaaaaagttatagaaatttctctgggtattgtgttgaatctacatcacattcagttataatcatttagcaatattattccattcaatatggcttgtatctcttatttgcacatgtttttatcactttgatcaatgtttgtagatttgaaggtagaaacttctcaacttttttcatttattcctaagtatttcttactttaagttctttagcaaatgaaagtgtttttttaattttctttttaaattgtttattgttaatgtatggaaattcaactaatttttggtgctgttattctattcttcaaatccactgcatatgttttttagttccagttgcattttggttgactctttgtgattttctacacagaagatcatgtcatctacaaagaaatagttttacttctttctttctgatttggatgagtttgatttcttttgctatttcattgctctagctaggacagccagtattgattgaatagaaggggtgagagcattcttgcatcatgtgagatcctacaggaaaagcattccattttccctgactggttatttctgctgtggtcatttcatggatggtctttgtattgttgaggtaaatttccttctctttctattttgtttaggatttccatgatgactggatgttgaattttgtgaaatgctttttctccatgtattgagatgatgtggttttcatctttcattatgttcaagtggtatatcacattgatttgcttgactatgttgaaccattttgcatcccagaaataagtggcacttgcatatcaacaatcctttttataacctcttgaatacagttcgctagtacaaggggtcttcaggaagttcatggaaaaatacatattatgagaaaattgtgcatgatatcacattttttgcaccaagataaactgatacaaatccgttataacatgtctgaacagggtttggtttgaggcactcagatgggtaagacatgagtttgaaaagagactcaatcaaggcaatgtaaattctgctaaaactgaaacaagaagaaacatcaaatttgcgatgagaccagatgctgtggctcaggcctgtaatcccataattttcagaggctgagacagttgggtcacgtgggccccggtactcaagaccagcctgggcagaatggtgaaaccaccttctctacaaaaaatacataaattagctgggcattgtggcacatgtctgctggttcagcttctgtggagtctgcagtgggaggatggcttgagcctaggagttcgaggctgcagggagccatgatcatgccattgtactccagcatgggtgacagagacagatagtgtatcgaaaaatgaatctggtaaagtttgggtagagggacaatgaaatcattgatgctttatgaaaaggttatggggacgattcccaaaataaatcaccagtttgtaaatggaaaacttattttaagttgggacaagatgatgttgaaagtgatgcacaggacaggtgtggtggctcacacctgtaatcccagcactttgggaggccgaggcaagagcatcacgaggtcaggagatcgagaaaatcctggctaacacggtgaaaccccatctctactaaaaatacaaaaaattagccaggcgtggttgtgggcgcctgtagtcccagctactcaggaggctgaggcaggagaatggcatgaaccgaggaggtggagcttgccatgagcagagatcatgctactgcactccagcctgggtgacagagcgagactccatctcaaaaaaaaaaaaaaaaaaaaaaaaaagaaagtgatgcacagagtggcaggcagaccatccacataagttttataggtacaactgtcaaagacgacactggagaagagccaagctggatctataaggaattgcatatgagatggcacacatattcatgctgtctgaagattcagtcacgttaccatatcaagctgaaaatgtcaccactatctggagagttggacatgttttattgagaatgtattttttttctctggatctgttatgaacacctttgttggcttggttcagtaataaatatgtgagacttttcatttaaaaaaagtcaaatgacttaattctgtattttaaattctgttttgtttgttttgtttttttgagatggagtcttctgaaaattttctcatcttctctaacccggttcatgacagacccttggactttactgttgtggaaaaatctatataaaacagtatcagtgtgtcaaagcattatggctgtcacaagcttgtgaaaggaaaataaaaattactaagccaaagagaaaagtcaatctgggaactgcgtcagacaaacctgccttccattttattcctaaacaagatagttacaaagattttttaaaaagctacatatgcccctcccaaaccgggaacctcaagatctccaccctaaaatagttctgttgaatttcaccctggcgatgtaaactgagagcttatcttcacagatgtgggaaagagcccatccctctgcacacctgagtcaaatgtctatctgattgcttcccttgccctatttatgtaaaaatacagggtccctgagccagcctaaggcataagtgacttatccctcctccctgctcacatataaattgtgtatttagtgaaaggctgatcaaagattcaaagaatgttatttgttatctacctgtgacccagaaggtccccaattccagttattccacctttccagaccggaccaatgtatatatgtactgattgctgtctcgtgtgtctgtaaaatgtgtgaaaccaaactgcagcctcaacaccatggacacacgtcatcaggacctcctgaggttcgtgttaattggccttagactctccctgtccccagacccaggacgcatgtgtttcctttttcttcatttctattaaagatgggtctcattctgttggccaggcatgagagcggtgacaggatcagccctcactgaagcttcaatctcctgggttcaagggatcctcccacctcagcctccaaagttgctaggaccatagccaggtgccaccgcaccgggcaaatttttgtgttcctagtagagatgggctttcaccatgttgcccgagctggtcttgaattccagggctcaagcgatccagccgtattggcctcccaaggtgctgggattacagccatgagccaccatgaccaacgtgtttcttaatttaaaaaaaaaaaaatagaccaggtgctctggctcatgcctgtaatcccagcactttgggaggccaaggtgggcagatcacctgagatcaagtatttgagaacagcctggctaacatggcgaatcctcgttttgaccaaaatatagaaattagcctggtgtggtggcgagtgcctgtaatcccagctattcaggagggtgaggcagaagaatggcttgaattcgggaggcggaggttgcagtgagctgagatcctgcaactgcactctggctgggcaagagcgagactccatctctaaaataaaattaaagtaatataaaaaactgcttctcatgaaagctttggtataatcttacgaggtaacatcattgttttgcaactacggtatgtgttcaaaatgttcttctttgaccccacatttcattagatatatttttaagccattttaaaattgtttttctctgaaatttattgtgtttagtttacattgaggactgcatgctttctagtctgtatcatacattggaaacattttctagtacctgataaatgattttaggttgtttcgatgtgtacttgataaagatatcaaggaactttttctttatgctaacattaaaatttagttgaagtagcctatta

SEQ ID NO: 7064 - DNA, 2295 bp, Homo Sapiens
  NM_207336
gagctgcaggcggcgagcgccattgtgagcagagccggcggggcaggaggcccgggcgcctgggtccccgcggcgcgggcggagcggccggccagccaggttctgtggcctgatccccaggaggagctactctgggttaccatgagagagaccttggaggccctcagctccctgggattctctgtgggacagccagagatggccccccaaagtgagcccagggaaggatcccataatgcccaggagcagatgtcctcttctagggaagagagagcactgggggtgtgctcagggcacgaggcccctacaccggaggaaggtgcccacacagaacaagccgaggctccctgcagaggccaggcgtgctcagcacagaaggctcagcctgtgggtacctgcccaggagaggagtggatgattcggaaggtgaaggtggaggacgaagatcaggaggcagaagaggaggtcgaatggccccagcatctatcgttacttcccagcccctttcccgcgcctgacctggggcatctggctgccgcgtacaaactggagccaggggccccgggggcactgagtgggctcgcgctgtctgggtggggtccgatgccggagaagccctacggctgcggggagtgtgagcggcgcttccgggaccagctgacgttgcgactgcaccagcggctgcaccggggcgagggcccctgcgcctgcccggactgcggccgcagcttcacgcagcgcgcccacatgctactgcatcagcgcagccaccgcggcgagcggcctttcccgtgctccgagtgcgacaagcgcttcagcaagaaggcccatctgacccgccacctgcgcacgcacacgggcgagcggccctacccgtgcgcggagtgcggcaagcgcttcagccagaagatccacctgggctcgcaccaaaagacccacaccggcgagcggcccttcccctgcacggaatgcgagaagcgctttcgcaagaagacgcacttgattcggcaccagcgcatccatacgggcgagaggccctaccagtgcgcacagtgcgcacgcagcttcacgcacaagcagcacttggtgcggcaccaaagggtgcaccagacggccggcccggccaggccctctcccgactcgtccgcttctcctcattccactgccccgtccccgaccccatcctttcccgggccaaagcctttcgcgtgctccgactgcggcttgagcttcggctggaaaaagaacctcgccacgcaccagtgtctgcaccgcagcgagggtcgcccctttgggtgcgatgagtgcgcactgggcgccaccgtggatgcccccgccgccaagcccctggccagcgcgcctggcggaccgggctgcggcccaggatccgatcccgtggtgccccagcgcgccccctcgggcgagcggtccttcttctgcccggactgcgggcgcggcttctcccatgggcagcacctggcgcggcacccgcgcgtgcacacgggcgaacggcccttcgcctgcacgcagtgtgaccgccgcttcggctcgcggcctaatctggtcgcccactccagggcccacagcggcgccaggcctttcgcctgcgctcagtgcggccgccgcttcagccgcaagtcgcacctgggccgccaccaggcggtgcacactggcagccgcccccacgcctgcgccgtctgcgcccgcagcttcagctccaaaaccaacctagtccgccaccaggcgatccacacaggctcccgccccttctcctgcccgcagtgcggaaagagcttcagccgcaagacccacctggtgcggcaccagctcattcacggcgaagccgcccacgcggccccggacgccgcccttgcggccccagcctggtccgctccccccgaggtggcgccgcccccgctcttcttctgagcctagttctcacgaggaccctttcttgcccacagtttcgagaggcccgtgccatgagaccgcctggggtgagcaaggcgacctgggctgctgcccgaaggtttggccgccgcgggacacctgtttccttcccgcagtgtctgcgtccgcacagcatacccagctcggacctcctaggacagagactcagcgaacccttgctgggaaccgctgagctgaagttcttggaaggctcccacccaggtgccccgttggaaagcagatatttcccggacccagcgcggcctcaaccagggcaggaaagagtggttatttatgtacttaaagtttcattaaagttaaaatcggaaaaaaaaaaaaaaaaaa

SEQ ID NO: 7065 - DNA, 499 bp, Homo Sapiens
  NM_207339
gggggcccgccatcttgattctttctcactgaccaagactcagccgtgggaaatatgagtgagcttctaagagcaagatcccaatcctcagaaagaggaaatgaccaagagtcttcccagccggttggatctgtgattgtccaggagcccactgaggaaaaacgtcaagaagaggaaccaccaactgataatcagggtattgcacctagtggggagattgaaaatcaagcagtgcctgcttttcaagggcctgacatggaagcttttcaacaggaactggctctgcttaagatagaggatgagcctggagatggtcctgatgtcagggaggggattatgcccacttttgatctcactaaagtgctggaagcaggtgatgcgcaaccataggtttcaagcaagacaaatgaagactgaaaccaagaacgttattcttaatctggaaatttgactgataatattctcttaataaagttttaagttttcgaaaaaaaaaaaa

SEQ ID NO: 7066 - DNA, 2694 bp, Homo Sapiens
  NM_207343
gtggctcggccgccccctccccccgctccgcccgctcagagcataatggcagcgtctgaggttgctggtgttgtggccaatgcccccagtcctccggaatcttctagtttatgtgcttccaaatcagacgaaggtctcccagatggtctaagcaccaaagactctgcacagaagcagaagaactcgcctctgttgagtgtaagtagccaaacaataaccaaggagaataacagaaatgtccatttggagcactcagagcagaatcctggttcatcagcaggtgacacctcagcagcgcaccaggtggttttaggagaaaacttgatagccacagccctttgtctttctggcagtgggtctcagtctgatttgaaggatgtggccagcacagcaggagaggagggggacacaagccttcgggagagcctccatccagtcactcggtctcttaaggcagggtgccatactaagcagcttgcctccaggaattgctctgaagagaaatccccacaaacctccatcctaaaggaaggtaacagggacacaagcttggatttccgacctgtagtgtctccagcaaatggggttgaaggagtccgagtggatcaggatgatgatcaagatagctcttccctgaagctttctcagaacattgctgtacagactgactttaagacagctgattcagaggtaaacacagatcaagatattgaaaagaatttggataaaatgatgacagagagaaccctgttgaaagagcgttaccaggaggtcctggacaaacagaggcaagtggagaatcagctccaagtgcaattaaagcagcttcagcaaaggagagaagaggaaatgaagaatcaccaggagatattaaaggctattcaggatgtgacaataaagcgggaagaaacaaagaagaagatagagaaagagaagaaggagtttttgcagaaggagcaggatctgaaagctgaaattgagaagctttgtgagaagggcagaagagaggtgtgggaaatggaactggatagactcaagaatcaggatggcgaaataaataggaacattatggaagagactgaacgggcctggaaggcagagatcttatcactagagagccggaaagagttactggtactgaaactagaagaagcagaaaaagaggcagaattgcaccttacttacctcaagtcaactcccccaacactggagacagttcgttccaaacaggagtgggagacgagactgaatggagttcggataatgaaaaagaatgttcgtgaccaatttaatagtcatatccagttagtgaggaacggagccaagctgagcagccttcctcaaatccctactcccactttacctccacccccatcagagacagacttcatgcttcaggtgtttcaacccagtccctctctggctcctcggatgcccttctccattgggcaggtcacaatgcccatggttatgcccagtgcagatccccgctccttgtctttcccaatcctgaaccctgccctttcccagcccagccagccttcctcaccccttcctggctcccatggcagaaatagccctggcttgggttcccttgtcagcccccacggtccacacatgccccctgccgcctccatcccacctcccccaggcttgggcggtgttaaggcttctgctgaaactccccggccccaaccagtagacaaactggagaagatcctggagaagctgctgacccggttcccacagtgcaataaggcccagatgaccaacattcttcagcagatcaagacagcacgtaccaccatggcaggcctgaccatggaggaacttatccagttggttgctgcacgactggcagaacatgagcgggtggcagcaagtactcagccacttggtcgcatccgggccttgttccctgctccactggcccaaatcagtaccccaatgttcttgccttctgcccaagtttcatatcctggaaggtcttcacatgctccagccacctgtaagctatgtctaatgtgccagaaactcgtccagcccagtgagctgcatccaatggcgtgtacccatgtattgcacaaggagtgtatcaaattctgggcccagaccaacacaaatgacacttgtcccttttgtccaactcttaaatgacggacctgactggggaggaagaagaagagaaactgatgtgaacaggaagcgcgggttcaagatttctaaaactctatatttatacagtgacatatactcatgccatgtacatttttattatataggtaatgtgtgtatagaaagtctgtattccaatgttcgtaaatgaaactatgtatattatgcagaaacagtctgttccccctcatcttgcaattcctttgggggatgcagattgtagggaagatgatgtttagtttggccttgaaattatgatatccctgcccagggctgttttcaaatacaatataaaaaccacctaggaacctgctgttgctctaaggccattctgctttggtttggctcagcctctagtccatttccttaaggctcatgtatgcagatttaaagcctggtgctcacccactgtccaaccagatgccttgcttaccgaaagcctccagaagcctcagtattgttttagccactctactccaaatggataaaatgagactctgattgaggaaaaaaaagtaa

SEQ ID NO: 7067 - DNA, 2122 bp, Homo Sapiens
  NM_207344
acgtgctaggggagcgggcgggcagatggctgtgtctgtaagcgggaggcgtgcccggttcatccaaggcgcaagatggcgctgctttttgcacgttctttgcgcttgtgccgctggggagccaaacgattgggagttgcctccacagaggcccagagaggcgtcagtttcaaactggaagaaaaaaccgcccacagcagcctggcactcttcagagatgatacgggtgtcaaatatggcttggtgggattggagcccaccaaggtggccttgaatgtggagcgcttccgggagtgggcagtggtgctggcagacacagcggtcaccagtggcagacactactgggaagtgacagtgaagcgctcccagcagttccggataggagtggcagatgtggacatgtcccgggatagctgcattggtgttgatgatcgttcctgggtgttcacctatgcccagcgcaagtggtacaccatgttggccaacgagaaagccccagttgagggtattgggcagccagagaaggtggggctgttgctggagtatgaggcccagaagctgagcctggtggatgtgagccaggtctctgtggttcacacgctacagacagatttccggggtccagtggtgcctgcctttgctctctgggatggggagctgctgacccattcagggcttgaggtgcccgagggcctctagtatgtccattactggagtccctaatcacgcctttggccagcctccttttgaaagtgtccgaagcctttttactttgcctcaagcaacctctagctcccacaattcagtgttgggtcctctgtgcaatatcatgatcatcttcctcatcccctaccttgtgaaagctaggcatacagccaaaccctccttttccccacccaccaactactgccaatttcctaggctaccatgggtgtatcttccttgacctgcttccttcagtccctctgcctccctttgcccaggcctttctcagactgtattccatcctggggtcttatcattcagctttgtttgaatttattaatcaccatgatacctctccctccctttgtccacatgtaacttgttcttggggctctaccagatggctgaagagtaaatcctttctacctctggctgaaggagtggtgcagtcaatgacttggccctttttctacagcacatttagagtttgggctctggctccctcagtaagtgctttattaactcagtgtgtcaaaatgaaaacagagccctccttccccagtagctcagtgccacagaccttcagccccacacagctgtagctatccttaccctgagtccatctaccttaaatctgtacctctgacacccagccagtctgtcataatcattatcccagttataaccttgaccaaaggggaagagagacacttgggggatatctaggggatgagtgctagaaactatttatttatttttgagacagagtctcactctgtcacccaggctggagtgcagtggcatgatcttggctcactgcaaactctgccttttgggttcaagcgactctcgtgcctcagcctcctgagtagctaggattacaggtgtgtgccaccatgcccgtctcatttttatatttttagtagagatggggttttgccatattggccaggctggtctcgaactcctggcctcatgtgatcagcccaccttggcctcccaaagtgctgggatttcaggcgtgagccaccacacccggccaaaactgtttattcttgagaagttccatcttcatttctgccacagttggaacttcccgaggaaggaaggaggcctgaggttttgcacaatctgtttcagagcctgtttagactcaaacctatgcttcccttggcagcagaatacacttaacctaaagcagtatttggagttgagaaaaacctggtggggtaagtgaatatgtactgtttggtagggtaggtagagaagctgtgctttgaccctgtgattccatctttttctaccttctatgatggtgatgaagctagatacccctagggaagaaagaaggactgggtttagcaaaaatgatttggtaattaaagtttatttgaacacaaaaaaaaaaaaaaaaaaa

SEQ ID NO: 7068 - DNA, 1673 bp, Homo Sapiens
  NM_207345
cgtttgtacccggctgtggcaatctgtggtgaagttgaaatgcttttctgctagactggcaacatgttttgattcttctcaaataactcgcaagctcttgtgaagcacaacggcctaccttgtcctgaagaaaacatactctaaggcccacagatgattaaacccagccatttatgtgacaatagcatttttatttttcttatcaagatctgggtatttgatccacacaatggtaaagattcccatgttagccaagatctaaatgattcaaactgatgatactctctgcagaagaggtgactataaacgcagcccctgtgatgccaactggacatattatggaggtagctgctatgggttcttcaaacacaacttgacatggaaagagagtgagcagtactgcactgacatgaaggctactctcctgaagactgacaaccagaacattctgtggatagaagtcaagggctccaatgtctcccaagacgaaagaatcccaagtctcatttggaggaatgctatcactaactaggattcctggagctaaaacattataggagttacttgttccagcctcctgtgtggactgctttcctatcaaagcaccttagacatgcacgaggaagaaatatacacctctcttcagtgggatagcccagcaccagacacttaccagaaatgtctgtcttccaacaaatgttcaggagcatgctgtcttgtgatggtgatttcatgtgttttctgcatgggattattaacagcatccattttcttgggcgtcaagttgttgcaggtgtccaccattgcgatgcagcagcaagaaaaactcatccaacaagagagggcactgctaaactttacagaatggaagagaagctgtgcccttcagatgaaatattgccaagccttcatgcaaaactcattaagttcagcccataacagcagtccttgtccaaacaattggattcagaacagagaaagttgttactatgtctctgaaatttggagcatttggcacaccagtcaagagaattgtttaaaggaaggttccacgctgctacaaatagagagcaaagaagaaatggattttatcactggcagcttgaggaagattaaaggaagctatgattactgggtggggttgtctcaggatggacacagcggacgctggctttggcaagatggctcctctccttctcctggcctgttgccagcagagagatcccagtcagctaaccaagtctgtggatacgtgaaaagcaattcccttctttcgtctaactgcagcacgtggaagtattttatctgtgagaagtatgcgttgagatcctctgtctgaaagaaattgtgttcaaagtgttctattacactgttatttggagcatgccattggaaaacccacccccaccccccctcaaaaaaacagaacagtaaaccaaaatgtgggccatgaaattagcaacctgggactcaataatacacttgggaatattcttccacaccgtccagatttcatttgatgttgttcacattgcaagagtaaaacttatttagagctacagaagacaaaaccctgaagagttaagaacaaacgcaaggaaataatttttattgtttaaagcccggaatgactgtaactttcacacaaggtacgcatctatgtttttggggga

SEQ ID NO: 7069 - DNA, 1970 bp, Homo Sapiens
  NM_207346
gtggcggcgcgcgcagcggcaggcggcggcgggatggagcccgagcccgagcccgcggccgtggaggttcccgcggggcgcgtgctcagcgcccgggagctcttcgccgcccgctcgcggtcgcagaagctgccccagcgctcgcatggccccaaggactttctgcccgacggctcggcagctcaggccgagcggctgcgccggtgccgggaagagctctggcagctgctggcagagcagcgcgtggagcgcctgggcagcttggtggctgccgagtggaggccagaagagggcttcgtggagttgaagtctcccgcgggcaaattctggcagaccatgggcttctcagagcagggccggcagcgccttcacccggaagaggccttgtatcttctggagtgtggctccatccacctcttccaccaagacctgccactgtctatccaggaagcttaccagctgctgctgaccgaccacactgtgaccttcctgcagtaccaggtcttcagccacctgaagaggttgggttatgtggttcgacgattccaaccaagctctgtcctgtccccgtatgagaggcagcttaacctggatgccagcgtgcagcacttggaggatggagatggcaagagaaagaggagcagctccagccctcggtccattaataagaaggccaaggccctggacaactccctgcaacccaagagtctggcagcctccagcccacctccctgcagccagcccagccaatgcccagaggagaaaccccaggagtcaagccccatgaagggcccagggggcccctttcagcttctggggtccctgggccccagccctggcccggccagggagggggtggggtgcagctgggagagtggcagagccgagaacggagtcacgggagccggtaagcggcgctggaacttcgagcagatctccttccccaacatggcttcagacagccgccacacccttctgcgcgccccagccccagagctgctcccggccaacgtggctgggcgggagacagacgctgagtcctggtgccagaagctgaaccagcgcaaggagaagctctccaggcgggaacgggagcaccacgcggaggccgcgcagttccaggaagatgtcaacgccgatcccgaggtgcagcggtgctccagctggcgggagtacaaggagctgctgcagcggcggcaggtgcagaggagccagcgccgggcccctcacctgtggggccagcccgtcaccccgctgctgagtcctggccaggccagctccccagccgtggtccttcagcatatctctgtgctgcagacaacacaccttcctgatggaggtgcccggctgttggagaagtctgggggcttggaaatcatctttgatgtttaccaggccgacgctgtggccacattccgaaagaataaccctggcaaaccctatgcccggatgtgcattagtggatttgatgagcctgtcccagacctctgcagcctcaagcggttgtcttaccagagtggggatgtccctctgatctttgccctggtggatcatggtgacatctccttctacagcttcagggacttcacgttgccccaggatgtggggcactgacctcacagctctgcagaggatggagcttgctccgggggaccgggactgtctgttctcagggaccatctcggctgcctcctgtacccagactctaacctgtagcttcagaggccagtctgggccttggccctgggtgtctgatactcacagagtgaaactgtgaccctctcccttccctgctgccttgcagtgacccctctggaactcaggactcgattttaaggacccaggaggtggggcagaagagaggactgtgtgcctttaacgagagggtgcctgcttcgtgctataaagccaaagccattaaaaatagatttcttttctgctaaaaaaaaaaaaaaaaaaaaaaaaaaaaa

SEQ ID NO: 7070 - DNA, 898 bp, Homo Sapiens
  NM_207350
ggggattcaccgtttgggtgaagacggaggcgggttctggacagacgtaggctgtcagggagtgtttacttcgcctccacttctgttcctccctgccctggtgctgctccaggtcacatactcgtcctgagccggcttcagcctgtccgcgcagaagtctcccggagccatggcctagtactcttatgtgaagtctagcaagctcgtgctcaagggaaccgaggtgaagagctgggtcctgcagctctggtgggagcctcctcagttcttttcggatgcactccacccccgcgaatccggtggaagccgtggtgcagagagccggctttgtggcctcccaggcttcgctccgaccctggaaacaggatagacgggcgggtgacccgtggccccgtacccacgagtttgggtaccctgaggcatctctccaggcctctgcctgtaagaagaaaaagagcaaagataagaagagaaaaagagaagatgaagaaacccagcttgatacgttggaatctggtgaacagtaacaaactttggtgaaatttcaggaaccatagccattgaaatggatgagggaacctatatacatgcactcgacaatggtctttttaccctgggagctccacacaaagaagaatcgccctgaaatctggctatggaaaatatcttggtataaattcagatgaacttgttgggcattcagatgcaattggaccaagagaacaatgggaaccagtctttcaaaatgggaaaatggctttgttggcctcaaatagctgctttattagatgcaatgaagcaggggacatagaagcaaaaagtaaaacagcaggagaagaagaaatgatcaagattagatcctgtgcggaaaaaaaaaaaaaaaaaaaaaaaaaaaaaa

SEQ ID NO: 7071 - DNA, 4713 bp, Homo Sapiens
  NM_207352
gggcctccagtgcaatcactacgccctggggcccggaaaccgttttccggtctttcgctttcggctggggcgtggaggccgcggtgctgcgtaggccgggccgggcgcaggaacagccccgtggcgccctctctggccgccgcccgggcgggaaacgtcgttccggggaccgggcgaccccgcagcggggagcgcgccaggtccgcgcggggaagtgggcggtgtgcggccggcaccgcctcgcaccacgcccccgcgggcccgcactttcccggagtgcaccccgcggccgccagccggggcgatggcggggctctggctggggctcgtgtggcagaagctgctgctgtggggcgcggcgagtgccctttccctggccggcgccagtctggtcctgagcctgctgcagagggtggcgagctacgcgcggaaatggcagcagatgcggcccatccccacggtggcccgcgcctacccactggtgggccacgcgctgctgatgaagccggacgggcgagaattttttcagcagatcattgagtacacagaggaataccgccacatgccgctgctgaagctctgggtcgggccagtgcccatggtggccctttataatgcagaaaatgtggaggtaattttaactagttcaaagcaaattgacaaatcctctatgtacaagtttttagaaccatggcttggcctaggacttcttacaagtactggaaacaaatggcgctccaggagaaagatgttaacacccactttccattttaccattctggaagatttcttagatatcatgaatgaacaagcaaatatattggttaagaaacttgaaaaacacattaaccaagaagcatttaactgctttttttacatcactctttgtgccttagatatcatctgtgaaacagctatggggaagaatattggtgctcaaagtaatgatgattccgagtatgtccgtgcagtttatagaatgagtgagatgatatttcgaagaataaagatgccctggctttggcttgatctctggtaccttatgtttaaagaaggatgggaacacaaaaagagccttcagatcctacatacttttaccaacagtgtcatcgctgaacgggccaatgaaatgaacgccaatgaagactgtagaggtgatggcaggggctctgccccctccaaaaataaacgcagggcctttcttgacttgcttttaagtgtgactgatgacgaagggaacaggctaagtcatgaagatattcgagaagaagttgacaccttcatgtttgaggggcacgatacaactgcagctgcaataaactggtccttatacctgttgggttctaacccagaagtccagaaaaaagtggatcatgaattggatgacgtgtttgggaagtctgaccgtcccgctacagtagaagacctgaagaaacttcggtatctggaatgtgttattaaggagacccttcgcctttttccttctgttcctttatttgcccgtagtgttagtgaagattgtgaagtggcaggttacagagttctaaaaggcactgaagccgtcatcattccctatgcattgcacagagatccgagatacttccccaaccccgaggagttccagcctgagcggttcttccccgagaatgcacaagggcgccatccatatgcctacgtgcccttctctgctggccccaggaactgtataggtcaaaagtttgctgtgatggaagaaaagaccattctttcgtgcatcctgaggcacttttggatagaatccaaccagaaaagagaagagcttggtctagaaggacagttgattcttcgtccaagtaatggcatctggatcaagttgaagaggagaaatgcagatgaacgctaactatattattgggttgtgcctttatcatgagaaaggtctttattttaagagatccttgtcatttacaatttacagatcatgagttcaatatgcttgaatcccctagacctaatttttccttgatcccactgatcttgacatcaagtctaacaaagaaaaagttttgagttttgtattttcttttttcttttttctttattttttttttttgaaaccgtgtctcactctgtcgcccaggctggaggagtgcagtggtgtgatctcagctcactgcaacctccacctcccaggttcaagcaattcttctgcctcagcctcccaagtagctgggattacaggtgcctgccaccatgcctggctaatttttttgtatttttagtagaaacagggtgtcaccatgttggccagactggtctcaaactcctgacctcaagtgatccacctgcctcagcctcccaaagtgctgggattatagtcgtgagccaccacgcctggccagagttttttatttttatcaccaccatagatgttacagttggctgtggtcacaaaagtagttaattgtgtcagcacccaaataaacatctaacaggtttctcaacagaggaatccacagtccaattccacttcaattgatagacccaaaaaatataatttaatcaaagttctagagtttttgtttgtttgtttgagatggagtcttgctctgtcgcccaggctggaacgcagtggtgacatctcggctcactgcaacctccacctcccaggttcaagtgattctcctgcctcagcctcctgagtagctgggactacaggcgcctgccaccacgcccagctaatttttgtatttttagtagagatggggtttcaccatgttggccaggatggtcttgatctcttgacctcgtgatctgcctgcctcggcctcccaaagtgctggcattacaggcatgagccaccatgcctggcccaaagttctagaattttttaaaggtattcatggtgactcaggaatacacacatacacacacacacacacacacacacacacacacatacacacatataatttgaaagaggtgagtatgtactctgacttcagctctcaggttttaaaaattatattagtgggaccagttatgacaagaataatcattatagtacttttcagattttataacctggagcagattattttaagttgattagtaggttctgttacagtttttcttttgatcgtgcacttatagtcttcatttaattcctcatagaatcccagtcacctttatatatcatattattggaagagattcatcttcataatctccagttttttcacagtgcctcacagagttaatcatgccttttggagctagaaggactttagaacttatctagttatgctcctttatattataagtaagggaatagaatcaataagacagtttctgcccaaagtcatgttaccagttggtgacagagctggaaatacgtagagatctatacccttaaatctctccactcacatgctgatatactttctactacaatatgctatagctttatggaactcagggtgatgatcagacgtgtcattagaacatgagtcctctgcttctgattcaggcatacttttgggattcttccatctttaaaggaaaaaggaagccattcatctatatttagtaacccagtaatatctcacttagtttagggttagatctttagttaattcaaccttatagatcatacttatgaaggtgataactgacacgtgttcactgaattttaatttgataggcaatacatctacccactccattattttttaaaacttcatttaatagtttaaacaagattggttttgttttcaatttttattcactcttcatagaatcacaattacctttatatatcatatgttattggaagagattcctcagtaatctccaatctctcatagtgcctcacagggttggtcaatggcttttggaactggaaggaccttagaacttatctgttatgctcctgatagccaatagcagatagaagcttgcaatcaagagggtaggacatgtgttcttcaatggatatcaaaggaagaggttgcaaaccaaagccatttggcaagccctgtagcctgggccatttaagacaggggcggtctcagccaaattgcacccatttaactatcccaaagagccacagtgcctacaacccaggccctaagttgatgaagaaaaagtcaaggaaggaggtgatacaattggaaatattcccatcaaatggttaatcttatttagaaaatgggcatattagaaaaagtccttccaagatgattttggataataaaagttgtatttgtggaaattggtattatctctgttttatgcacttacatttatcccttacattttgtttttagtgaccctacatgacattaaatttaaagtaaaacattgtttaatgttaccttttggcttgagaatgtctttcagctccagaattattgttactcatattttaatcagtaagtcatttaagctatgacagagtaggaattgagaaattatttcatatgctacagtattgaaatgtggatgctgccttgttttataagaagatgatcaaggtttgtgtgcccattacctttcctctgcctgaaagacgtgtctcaagaaaaataaattctattttagatgcaggtactgcattttattctaagaattgatatcaattcaaaacatagaaaactgtaaaagataaatcaggagatggctgattcataatgggtaataaaataaatagcactttcgagctgaaaaaaaaaa

SEQ ID NO: 7072 - DNA, 2292 bp, Homo Sapiens
  NM_207381
acttgctagtcttacctcaagtaatgggaaacgaccagacctcctaaagagtcagtgtgcaagttagggctactgtcccaagaaggacacctgagtccaaatggggaaaccacggcaaaacccaagcacactggtttccacactctgtgaggcagagccaaaggggaaactgtgggtcaacggatatgcagggacccaaggcacaagggatgccacgttacaaacaagactcatccccttatcttttcatcttcagaggggaaagggacttgccgccccgctgtccgccctgagtgcgccgcggctgcccgagcgccccgcagacgggcgggtggccgtggacgcccagccagcagcccgcagcatggattcggattccggggagcagagcgagggcgagcccgtgaccgccgcaggtcctgatgtttttagttcaaagagtcttgcgcttcaagcccagaagaagattctgagcaaaatagccagcaaaactgtggccaacatgttgattgatgacaccagcagcgagatctttgatgagctctacaaagtcaccaaagagcacacacacaacaagaaggaagcccacaagatcatgaaagacttaatcaaggtggcgatcaaaatcgggatcctctaccggaacaaccagtttagccaagaggagctggttattgtggagaagttccggaagaagctgaaccagaccgccatgaccattgtcagcttctatgaggtggaatacaccttcgataggaacgtgctctccaatctcctgcatgagtgcaaggacctggtgcatgaactggtgcagcggcacctgacgcccaggacccacgggcgcatcaaccacgtctttaaccactttgccgatgtggagttcctctccaccctctatagtctggatggagactgtaggcccaacctcaagaggatttgtgaaggaatcaataagttgctagatgagaaagtcctttaaatgccttccctcctactggactttgctgctttaaagttacagcactcaaccatgatctgggtgagaatcaagaacataagcagaaacccttgtcaaagatgtccatgttctttcctgttcatccctctgatgctgattctgatgctgaactgagctcaggtgtgtttttcttccaagctttctagcaaggtttctacttaaaatcacctgtgtgcaagcccaaaggacatttcatctattctaagcagaaaggctgttttgttcattacagtgagtgctgttcatctcatggagtgggaggagcactaaaccaggagacagaggacatggatttggtttccagcttaaccagttaggactctgtcctctgcattctggaaccatgatgcctgcctgcctgcctcacagggctgttgtgaggaccagatgagatgatgtatgttcatacttttggaatctctaatttaaagtcttaatattttgtcttctgagtgtgaggggataaacctggatgtagactattaagcagcataggagaaaagaacaatagaatctaatggactgggtttgcaatctctctctaaatgcactgcttcagacaaagtgaaatccaaaggtgtgaaaaagtatagctgcaaattggaaaaatgtgtttcaagagtcgtctttttggccaggcatggtggctcacacctgtaatcccagcactttgggaggccgaggtgggcagattgcctgaggtccggagttcaagatcagcctggccaacatgatgaaaccctatctctactaaaattacaaaaattagccaggcgtggtggtacacgcctgtaatcccagctactcaggaggctgaggcaggagaattgtttgaacctgggagatggaggctgcagtgagctgagatcacgccactgtactccagcctgggcaacagagcaagactctgtctctaaaaaataataataataataataatttttttaaaaagaggtgtttttgaggtcttagatgttcaggttgatgatcctgcagagggaaactttccatgggggggtggggagagagagttttccatccacaatatagaaacagagaagcactgtgctccctctgcaggaccagccttcccttatctaaggggcatggagctcagggaggctttattccatatgcacgggagaatcaggcagaatgaacccctacccatcttttttggcttttcagtcattttgtgctgttttctctggttcattaataaattgaaactgccctccaaaaaaaaaaaaaaaaaaaaaaaaaaaaaaaaaaaa

SEQ ID NO: 7073 - DNA, 1954 bp, Homo Sapiens
  NM_207388
agttgtccttgactgcatggtttctgctggtccaagcaaacttctcctgccacgcctaaccttggagagcaggctggagtgcggtggcaccatcacagctcgctgcggcctcagtctcctgggcttaagggatcgttttgcatcagtctctgggtagctgggcctacaggcgcacaccaccaaacccggctaactttttattttttgtggagatgggggtctctctacattgcccagactggtctcaaactcccggcatcaggtggtcctcctgccttggcctcccaaaatgctgggattacagtgatcaatggaggaagtgtttcatggtggacatgggaaactggccagatcaactgctgtcaccttctaagacccagacggggaggaggaatgccagagaagctgcagactctccggccacggagcctgagtggagcagaggtggcccactgtcagccacaggtcaagtgtcagggtggggacggggcaggctccaccagaaggcgggggcaggctccaccagaaggcggggccagaccacagggcaaggtggagatgagtctgtggcacccccaggaagtttaccagatttgccccagagcttctgaccctttggatctctctgggctgcattcttcagggtcccattgcttctttcttgaaggtggaaggaaatgttcccatcagagccttccaacaggccaccttgggggcttctcctgagagctccttgtgcacacaccccttcagggtggcttgggttgcgccctcagaccccagtggggggccgtatggcatcctccttggtcagcaagtgagccacagcagcaggcccctcacagacctcagcctggggccacaggtcccttctccccatctccgcatctggagaagcaacctgtggagcagccaagagtggcagccctggctctctacagcattcattttcagggcaagacagagcatttccactattatgctcccccccccggccttttttttttttttttgagacagggtctcactctgttgcccaggctggagtgcggtggcgcaatcatggctcactgcagcctcgaccttctggggtcaagtgatcctcccaattcagcctccaaatttctttaaacaaaaaaaaatgcaagaaaggcaaaacaagatatttatctgggctgagagggtaaagagaagctctatctttgagctgagacacaaaatggaaagaagaggcagcagcagcggcagtagcagttctgcctttccaaaccttccctatctaagtgctttcaagatatgctgaaagtcatgaattgaagtgtggttcccacggctttagtccttgtatgaaggtccttttgctagaacttacttcctttccagcccatatggttgacctgggggtccaggcagttctcaagggaaccacaggattccatgtgatctgggatcccagttgatgatccctcttctggtcacaagctgaattggacccaaatctgcaccctaaactcccctcttgccagatcctgcccagtcagtgccgtcccctcagactgggtgggcagcctgggcttcctgctgagacgggacccccccctctcttcttgatctcactcccaggaaagacactgaaggagcagaggtgtggacgccacatactggacggggtttcaccatctgctgggacgggacaccctctcttcttgatctcactcccagaaaagacactgaaggagcagaggtgtggacgcctcatactgctagagacggggtttcaccgtgttggccaggatggtctcaatctcctgaagtcgtgatccacccgccttggcctcccaaagtgctgggattacaggcgtgagccactgcacccggctgaaattgtatactttaaagggatgaattttatggtatgtgaattatgtctcattaaaaaaaacaaactgttaag

SEQ ID NO: 7074 - DNA, 3178 bp, Homo Sapiens
  NM_207405
gtgaaagaagcacatttggagaaagaggagaagaggcccaggtgttctgtggctcaggggcaagctctgagctccctgagcaatggccccatgctccgggactcagaggccgaggttactgaggaggatcccaggctgcgggcccagcagctccatcaccgggtgctgaccctgcagtgccagctcagggaccagggcgctgcccaccaggcgtctctggacgaggccacccgcctccaggaggagctccaggccaagcttgaagaacttcagaaaaagcaacatgaagcaaagttggcagtgactcccctgaaggccaagatagcttccctcgtccggaagtgccgggagaggaaccgcctgatcacccacctgctgcaggagctgcacagacatgggctggggaacctcctgctctccgagctggcgcagaacatgctcaacgacgtggcactggctgagtacacggccaccttcctggctccgggagtcccagagacaagccaccacctggacgtcaagtctgagatgacggcagctttaagagctcagacatacctcttgaatcctgaaatggacagtgtcctccaaagctcattgtcttcagagtcctggcctattcccgagccggagtggccagcacagacagcccaactggattctctgaagctccctctgtccttggtgtccacgcttgatcctggaacgtgcctggcagcggtcactgtggaaccaggtctccccgcacaacgtctgcaagaaaaaggcggaatgccctgtcctgccctccaagtcgataacgtcccagcaccctctgagctcctgagcccagcaaggatcctggcttttcaccaagagcttagacaaagcatttgcagcaattcccaggtccataaatcaccgctggagttagaaatgtaatagggccactcattctccggagccatttcatagactccataaatatttgaagcagaaccttcagagagtgctttaagaaattggtagcaatcagagccctcatttagtggcaagtggttttgccttcggctttgggattttgtgttcattgtcagagcttgagagaaacgctggcctgtgcctggcaaattctgaggagtttggctttggcaatgtcaaggcagcataggaaatatttactgtaccaaaacctattgaatgattggtccagaggttctcaactgggcacagttttagccccccagggaaaatctggccatgtctggagacatttttggttgtcacagctgggacactgctactggcatctggtgggtagaggccagggatgctatgaaatgtcctacaatacccaggccagcctcctacagcaaagaattacagcccgagggtcgccagtgctgaggtcgagagtccaggacggatctcatagctcccaacaagatcagccatggagaattgttttgttttgttttttctctgcccccggggtccttcccatgttttaaaagattttttgtctactaagtgaaacgcctaagtcaccatatattttacatttaaaaacattaaaactaaccagaactttctaatcagtccatccactccaaaaacgtctgttgatatccactggatgccaggcaatgtggcatgaaggagaagagacaagtcaatgttgatcctggcgctggggacctcacaggacaatgggagagatactcctgtgagtaaatcagcacgcacgcaagtgtcacatgtgccctgagcaacgggatgaaggtaagggtccgttctacttggcttgggacaactggaagtcagccacaaaggaatggctgggcagtgtccggtgggtgaggtgggaagggtgctgctgtacgagggaacgcatgtgcaaaggccctgaggcataaaactgaactgtggatgtgcccctggaggggaagtgggcaaagcatgctcttgtcaagccagctgcaagcagtcactgcatcgttcccatccagcaccccttccttccaccgagaacagagactcgtgccccgaatcaggtgggcgacccaggagaagagcacttctatcctgagggcagccccccaaaaagagagtctagggagcttggacgacacacaccagaccctgacccaggctcacccaccagagatgtcacctctctctttgggaaggggctgaggaggggcttaagggaaaggccaaagccgctacctgtccaattctgtcctctcctggaagtgactgtcccttcacggaaggacaaacaaggacaaggacaaggaactgacggctccccaggaagtgtcaaagtgtatagatttattttaacgtagtttagctttttgtttgaaatgaaaattacacagagttcccgtagactcttccccgggcttcccttgatgttaacatctcatgtgacttatgttgtacaattatagaaactagtgggttttatttcgaggaaaattggggagccattgagacgtaagaaaggcagcctcagcacattgagttccaccctttaaattcgtttatggggttttctgatgggttagcacattcatccatgtattcctggattgatttacccacagatctgtctatttatttatttattcaatatgcatttagtgactgctgtgcgagtgtctggctggatgctgctggggaagaagtgaagatgatgctgtccacctaggttttcagggacccccctggagaccctgtggccccgttaccacccctcaagaatccccagattggaaaccactgcggtgatccctttgttggttcaaccaccccagggcttccctataatttccaagcaggaagtgacctgcagcactggtttggtgatccgccttctgcctccctctgtattttgggacaacgtcattagctttgagcatcaggaacatgacagagagaggacagaaacccggtgcagccgaggacagccagctgagcccttgctgagccagcgagatgcagcgtggtgccaccacatctggtctccaggagtcccaggagctcagacgtccgtcgtcttgtgacttcatgctcccctctgccgcgctcacgtgctgggcctgggcagaaaggcaacccaggaaatccattaaagcaagccaagacgacctttgcagcgtaacccaacgattccctaataaatcatgtttcc

SEQ ID NO: 7075 - DNA, 3178 bp, Homo Sapiens
  NM_207426
atggccacctactgcgacgacctgggcccctcctcggccccgcccggccaggcccaggccaccgcgcaccccccgggctatgagccaggggatctgggcgcggtgggcgggggccccctcctgtgggtgaacgcgccagcgctcagccccaagtcctacgcttcgggtcccgggcctgcgccgccctacgcggccccgagctacggggctcccggcccgctcctcggcgccccgggcggcctggcgggcgccgacctcgcctggctgagcctctccggccagcaggagctgctgaggctggtgcggccgccctactcctactcggcgctcatcgccatggccatccagagcgcgccgctgcggaagctgacgctcagccagatctaccagtacgtggctggtaacttccctttctacaagcgcagcaaggcgggctggcagaactccatccgccacaacctgtcgctcaacgactgcttcaagaaggtgccccgcgacgaggacgacccaggtaaaggcaattactggaccctggaccccaactgcgagaagatgtttgacaacgggaacttccgaaggaagaggaagaggagagctgaagccagcgcggccgtgcgctcgggagccaggagcgtgggaggggccgaggcgccagcgctggagcccccgagcgcggcttgcctggacctgcaggcctcgccctctccatccgcacccgaggccgccacctgcttctccggtttcgcttctgctatgagcgctctggctggcggccttggcaccttccccgggggcctggcgggcgacttttctttcgggaggcggccaccgacagtcgccacccacgctccccagacccttaacccctcccctggcttcgcccctggccaccagaccgcggccgccggcttccgcctcagtcacctcctctacagccgggaagggaccgaagtttgaagggaggctggaggctagccgggtgcgggtccagaggtgctgagctcaggcctccggtttcccctggtgacagccccacgtgttggcgttgaaggccttggtgccctgggaggaagcgcagagccgggggcggctcggccagcagggagctgggctgagcggctcttgggctttggggtgggtggcccttctgctgtgcacccctcacccaggcgaccttcggaacctccctgctctgcctctaagtccagccgccctgggcgtctagaacctgtgctctcgagggatttgccttgaaggggcggcgggtcggccctcagctccagcgttttccaaggaggctggctgactccaaagagccttagagcagatgggaagaaggtgggctgccagagcggcccaggtggtgggggccctttccacctccacccagcttggcccacctggctcagggccttcccttctgcttcagggaagctgccgcaggggctgggggacagagctcaggagcagctgcagtgggctccaggtgggccaggagcctgcagtgaggggatctgagacagttggcattgggtcctgtgtaaggaaggtcttgctaatggttggaactgctggtggtgggagggagaagcactgcgtgggcagaaagcgcccttgggataccagctcccttccctgtcactcagccctggtccttgatgacccccctctaggacaaggcaactccccagggccccgccaccactgaccacaggagcggtgcccagcacccaggagttccccaagggtccaggtttgtgccacccacacccacactcacacccacactcacacccacactcacacccacacccacacccacacccacactcacactcacactcacacccacactcacacccacactcacacccacacccacacccacactcacacacactcacacccacacccacactcacacccacacacactcacacccacacacacccacactcatactcacactcacacccacactcacaccacacccacactcacactgacacccacactcacacccacactcacactgacacccacactcacacccacactcatactcacactcacacccacactcacactcacacccacactcacaccacactcacacccacacacacccacactcatactcacacccacacccacactcatactcacacacccacacccacacccacacccacacccacacccacacccacactcacacaggctcatggaaggccacacttgttttggtctctttcccctccaaacccacagtttgagccaaagctgtgcgtgtgttcagagctcctgaacagcagcctcctgtgtaaattgaaccctgccccacccagttccttcttagggatggtatctttgtgaaggacaaggagcccccagtcactgggaagaggaattttttggcctctgtactccttagaggacctaagtgccccagtcagatgccctgagtctttgtggcatctgggactccctggagatggagacgttggtggggggggggtacccaccttgttgttgatgggggtacctatcttccctgcattttgggggagggtgggaggggtccttcccaggaagagagtggagacaggttactgttactttggagtgggacaggctggtttagcaatcctaagccccagccacgcaggtattcctgatctgcctgcagggcccctcactgcagctgccaccagtgctggaaatgagagcagggctcctgactgtccctagagctgactcatcatggccctgctgaagagtgaggtgtgtgtgtgtgtgtgcgtgtgtgcgtaagacagagagggagggagaaggaaggaggcgggggaacatggagagaaggagccaggagttgggataaacctggccctggtcatatgtttcatcagcagtggctcctaactccacgtgccatctctgctgctgccctccacaagcaggtgagcagagtgccagttgtgttgaaggtgatgatgtcgcctaactaaactcacaaccaacccgcaatctctcttggggggacactccccataagcaatacaattaaagaagaccaggaaaggaaaataaattccttagcttatacatttaaaaagtatcccttgaacctattttaatagaatgaaatgctaaaaataaagaccaatataacatacat

SEQ ID NO: 7076 - DNA, 1597 bp, Homo Sapiens
  NM_207436
agccttctgggtccgaggctcccacctgctctaagcgcttgacaccctttaaaaaaatgtatttaaagaggctggttcctatccatccgactggaggcatctcagtgcaagagcaaagctaagtcctgcacacgctcctcccctcctcctcctccttctccccccaggttttcccgaatgtatctactccggttacaactagacgcggcccctcccccacctgcctccccccttccttccctcgatcgtggagggagcgttctctgtgccttcccaagtccccgtgggggaccttctatgttggagtggggggagggggggagggtcatataacgaaggccagaaagaacaaattagataatcaaaagaattatagtaattgctttcactttcccccgcccgctcagcggattccctcccccgcccctcccctggtttttctgtctgtcgggaatactcggtctttccgaccccctcccctcccccaggttcctcctctcctctccccttgctcgcgcgttccctctcttcctccgttttctggtgtgctggaacgttcagcggaatatgatgaatgatcacctgtcacagcttgtttattataatgcaggcaatcaattacacatccccaatgctggccggcccgcaggaaatttatatgctcagcacaaaccaatgtgaaaatggaatctcatttgccaaatgtctttctccccgtacagcacgatgattacagtctgtgtttgtttcaacagtcgtgtacaactgacagtgccatcatttactgcctggctcaggtcacgttactctaaggctttatttatggtgttacgaagggcagcacaggaaaaggacaagggtgtctgtcagggatggcactgtgttaaaaagtgggcgtgcaagggccgcattcccgggcagccgctgcaacctcagcccctgggcccttacctccgcagcctctcccagcatccagctacccagactccaaggccccaggcgagagccagctctcggtacctggagctccacaggtcccagaatcggggtgggtcagagttcaaattctggttctgctactgtctaattgcgtgctgcagggactcaatctcttcatctgggaaatgggagtaataacccttggcaggaatgttgcgatcctctgggatgtcagaggtgttgatgaatgttagttcccgggacttcggaaagaggtcccgttggaagagatgtgaattggaattcacaccctatattaaaatctcctccaatcttcacctctgagacatggctgtctcaagactgttttgtttcccttcctggtggaattttgcacttttatgtcctgtgtagcagcaggtagtgtggctttgagaaaataaaatggccaccttgctccgctgttctttctttgtaaaaaaaaaaaaaaaaaaaaaaaaacggcatagcaatcttggcctttctagctgtgtgaccccaggccggtcaatccctcctcctctccaagcctcggattcctcccctgagaagtaaagaaaataactcctaaactgcctcccgaggcttgctggcaggatccaaggtgtccagagatgtt

SEQ ID NO: 7077 - DNA, 2261 bp, Homo Sapiens
  NM_207472
agcaggcttcgtgagctggggaagtgccagaagcagccttcgaattagacagacctggacccaaaccctttctcttcccccagcccattttggcatcttggcacgagactgtccccatttctggaaagggtgttcacaagaacagtctggctgggttgttgggatgaccgagtgtgatcatgcgtctctatggctggccatggtgtttattcgatggcaggtattaccaggatggagcgagtcccagtaggaagggcctttaggatgtcatctggttccacccaacagggatgggaactgtaattccccactctccctgtggagaatcagggcgggctccggatggatggccaaaggctgcacagaggcgctcctgtgaagaggaagcctcaggagggagtgagagcagaagggagcccacctgtggttgtctcagcaacagcagaagaacctgggccgctgggagtggagttggagagaaacaggttgatttggaagttcttctgcaggtagaacggaaaggcgaattctgcaagatgctctggggtccactgagctcagctgcttaggctcagctctttctgtggcttcttcttgagcagcctgttgaccaagatgtggcccatgccactccctatattcggagtccattttctgatgccctctttcagctcttcgcctgcactcatctgtgactgcctggtactgctaggaagcctctgtttgtgtctcatctctccaggtggactggagctcctgggggtcctttcctttgtgggggttctcaatatcagaatggagtcgcttatgtcaaaccctaacaaaatggaggtggaggtcacgaattggagcctatatgcgtgcctgtaacaggacttgtcacaaggaatccctgcacatatgtgtatgatggggactatgccaggaactcctcacatatggaggattcgaggtaagccatttgctcaaggacacttacccagcaatggcagcctccactaatgagacatcgccaactcctgtaatcaatggtctttgtttctaaacagcttatgtggaattctccgtttttttgtctgtaaaagttttctttagccccaatctctttggatatgcctatgattcatcatagcacatgtttcccaggttgcaatcccctgcaattcccaaataagctccttttgtggagatcctgtctctctctgtcattatttaggttgacaccttttatgtcctgcattgctgttgatgacacccacatttgtacctcctgcttgaatgtcccctcccccaactccaaaattcctctctctgtctaccctgtacctctatttgaaccactaagaggcatctcagacttaaagtgtcccaaactgagcccctgtgatgcccccagagctgctcctccccaccacctcctcctcagcaatggcagcttgattcttctttgggctttattcagtcccccaactttggagctttcttgacccctctctattgctcacatgccatattcaatgtgtaggcaaatcctttggccctgccttccaaagacatgcagaatctactcacttctcgccacctcgctgtctcactctgcgtcaggccaccctgtgtgtccttgcacaattgcgggagccttggctcgagtcctccagaccttctacctctttgacttcatctagtgctgctccaagccccgtgctcttccttggacacaccaggcatgctgccagcagagcctttgcatgtgctgttccctttgtcgggaagccttttccccagctatctgctcagctcatccgctgtctctttcgtcctcgctcagattccccttctctgtgaagcctttctgaccatcctcattaaaatcaaataaccccacccctccactctcttgcccattttcctcatccatttccccctaggactaatcactctctaacattctctatatatttttctgatatatttgtttatatgtcttgcataaacaaaatgatttggtttatggtctatctcttcttgctagaatgtgagctctacaagggtagggatgcttattttgtcaccgttgtgtccctgactcctaaaatgctgacggtgtggccagctgcatgccctgctgtctctattttgaaactctaacaaaattttggacaagaccctcctctttcattttatgctggacctggaaaattacagagcaggttctgacttccaggcacatggtacgcattcaataaataatctcttgaatg

SEQ ID NO: 7078 - DNA, 1711 bp, Homo Sapiens
  NM_207507
aacaaaagcagggtagggctccagctaagccacgtaggcactacgatgggcaacagaaaggttggtttctgggcaattcagagaaaccaaggacagctacccccagaactcagagtagccaactgggctgctcacaggagatgccttaactgaaaggtgatcagactccacaggagacccagagaagatgtggagggagctcagaggctgtcctggaggagacctggagacagctcagaggctgtcccagagaagacgtggaaagagctcagaggctgtcccagagaagacgtggagagctcagaggatgtcccagagaagacgtggagagagttcagaggctgtcccggagaagacgtggaaagagctcagaaactcagagactgtcccggagaagacatggaaacagctcagaggctgtctgcaagaagacgtgcagagagttcagaggctgtcccggagaagacatggagagagctcaaaggctgtccacaagaagatgtggagagagttcagaggctgtcgttactgctgcacttggctgtttttctttggataattattgcaatcaattttagtaattcaggtgttaaatcacagtcaagcacctatttacctagtggtaaaatccttaagtaagtcatatttggttgggaagatcaaagaaatcacccagtctcccacatccgaaattgtgcagtctggactgtcaggaacaaaagtgaaagagagacgtcatcaaggccgggcgcggtggctcatgcctgtaatcccagcactttggaaggccaaggagggcggatcatgaggtcaggagttcaagaccagcctggccaatatggtgaaaccctgtctgtctctactaaaaataaaaaaattagccaggcgtggtggcgggcgcctgtaatcccagctacttgggaggctgaggcagaagaatcacttgaacctgagaggcagaggttgcaataagccaggattgtgccattgcactccagcctgggagacaaagcgagactccatctcaaaaaaaaagaatgactaaaattaagaagattgatgattccaaatattggtaaagatgtagaacaactagaactcccacatattgctgatgaaaatgaagaataatacattactttggaaaatactttggtactgatttaccatatgaccccaaaatctcacttgtagaaatttatacaggaaaaatgaaaacatatgctcacagaaagcttgtatacacatgcttatggcaataaatttatttatagttgcctatcaacaagtgatgaacaaatatattttagtatcttgatactactttctagctagaaaaggaatactactaagcaaaaatagaggatgaagtagtaatatacataacatatatgaatttaaaaacaccatgctgattgaaagaaaacaattatcaaatacacagtgtaatattctattcacagaaagtttgaaaacaaaaaactatagtctctgaaagaaaaccattggttgcaggaaggtggggattcattggccacaaaagggactgaggaagctttttatgggtaatggaaatattttatatcttgatggtggcaccaattatacaactgtatgtacacatttgtcaaaattctaatcgtattatacacaacatgagtgactttaactgtctataaattatatctcaataaaattggtcttaaaagat

SEQ ID NO: 7079 - DNA, 3724 bp, Homo Sapiens
  NM_207514
atccagcgcagccgggagacagatgcgaggcggcggtcagcaggtgccgaacccacggccaggcttccgtggccagcagccctagaggaatggccatcctgtccctgcgagcccctgggccctggcaggcgatgcaggtatgggcagacaggacgctgttgactccgcacaccggcgtgacttctcaggttctcggggtggcagctgcagtgatgacaccgcttcctggtggtcacgccgcgggcaggacgcgggaggccaggtgggatgctatggaatatgatgagaagctggcccgtttccggcaggcccacctcaaccccttcaacaagcagtctgggccgagacagcatgagcagggccctggggaggaggtcccggacgtcactcctgaagaggccctgcctgagctgccccctggggagccggaattccgctgccctgaacgcgtgatggatctcggcctgtctgaggaccacttctcccgccctgtgggtctgttcctggcctctgacgtccagcagctgcggcaggcgatcgaggagtgcaagcaggtgattctggagctgcccgagcagtcggagaagcagaaggatgccgtggtgcgactcatccacctccggctgaagctccaggagctgaaggaccccaatgaggatgagccaaacatccgagtgctccttgagcaccgcttttacaaggagaagagcaagagcgtcaagcagacctgtgacaagtgtaacaccatcatctgggggctcattcagacctggtacacctgcacagggtgttattaccgctgtcacagtaagtgcttgaacctcatctccaagccctgtgtgagctccaaagtcagccaccaagctgaatacgaactgaacatctgccctgagacagggctggacagccaggattaccgctgtgccgagtgccgggcgcccatctctctgcggggtgtgcccagtgaggccaggcagtgcgactacaccggccagtactactgcagccactgccactggaacgacctggctgtgatccctgcacgcgttgtacacaactgggactttgagcctcgaaaggtttctcgctgcagcatgcgctacctggcgctgatggtgtctcggcccgtactcaggctccgggagatcaaccctctgctgttcagctacgtggaggagctggtggagattcgcaagctgcgccaggacatcctgctcatgaagccgtacttcatcacctgcagggaggccatggaggctcgtctgctgctgcagctccaggatcggcagcattttgtggagaacgacgagatgtactctgtccaggacctcctggacgtgcatgccggccgcctgggctgctcgctcaccgagatccacacgctcttcgccaagcacatcaagctggactgcgagcggtgccaggccaagggcttcgtgtgtgagctctgcagagagggcgacgtgctgttcccgttcgacagccacacgtctgtgtgcgccgactgctccgcggtcttccacagggactgctactacgacaactccaccacttgtcccaagtgtgcccggctcagcctgaggaagcagtcgctcttccaggagccaggtcccgatgtggaggcctagcgccgaggaacagtgctgggcaccccgcctggcccgccaggacccaccctgccaacatcaagttgttccttctgctccggagacccctggggtgcggccctggccccctccacccctgctgggccagagcgggtgggcagtgtcaaggcccgctgtctcccaggtgcttgctgggactcggggcggctgcacctggctgtcacctgggtgtgctgctgtgaggggtccttgcgtggcccccatccttcccccaatgcagaactccatgggcagggagctggggggacatctcacctcccccatggcacagagccctccacacccctggaccagggcatccgggccctagaaattccacagctcccgtcctggccaccctggaagctcatcaggccaagacccggacagagcttcagaggagtgttgagtgacacctgaggatgcggctgcacacactcagccaagggccgagtctcacctgcggtggggtgtcggctctgcctgggggctccatccctttcagccactcgtggccttggggatttctggttgtccccagctgggactgttcacagttgtcacctgcagacctgcctctccctggcctgaggttcaaaggcctcatcggatggtcagtacagtggggtcacctgttgtttctatacaacagcagggaaggggccatggagcttttccctgctgggtgctcctgctttggcccagcccacctttcctggtgctccaagctaggaggctgtggccccagcctgaggagggtgtcctggcctccaggtgtgcagcaggggctgtgtgctgggggaggttccagttaggcgatgggatcctgcagtggtctggtggcatttcttggaaccagatttacctgaggagctctgtcctgctccctgtggagggctccagatagctcagaaatgaccagccaatggccttttgtttgggggcctgaggtcaagagagctgagagtattcgctcgactgagcacattcaggaagatcagggcaggcgtgtgggaggtccctcactccacgggacagaggcccctgggcagcagaggaaacctacagctctgggtgaggggacacttggctttggtgtttgcactttacagatcctgcggtccacgaggggcctcaggagaggacgtgtcaggacgtggcttcccagccttctgccttgggcagtgggggtgctcctgtctgtccttttcccccacaccctggactgtgcttggctgttggtgcacatggttggcacacggtgggcagagggcagagaatgccactgcttggttattggtcccctttgaccaggaaacccaagaggagacacctcagtcagcagaaaggccacctggctcactggctcattccaggagtgggagagacggcagggtctcctctttgtcctccggcatcaggaaggggatggtgtccactccccactgtggtggctttaggcaaggttcttattgtctgctctgcctcggtttccccatctggaaaatgggggcaggggtcctgacctacctcaggtggaacggtgagcagggaacatgtcggagtccttcagagaatgtgatgtgaggttggatcaacagtgtgggttcctgtcctgtttccccttcctctttggggctgaggaggaggttaaaggccaaatgctgtttcccaacaccccaaagtctgcacacgtctcatgaatgcatcacatttctgtcatatggatattagccattccgaaatctgtgtaatcaacttcacattattcaagttacaaatcactgtgtccatagaaaaactgtgctggtatttgctggacaaagggttgggccccttttatttttacctgccacccagcatctcccccacctgccccttctgggtgacacagccggtaaacggaatcacgtatggttctttctgtgggtctgtggcacagcaggaagagcccggtgccgccagcaccttgtggaagaccacacatgggtggtcccacagcatgggaccaggctggcctgagggatgcccagttgtaacaatgctgctgtcactgtctcattaaatatacatccttt

SEQ ID NO: 7080 - DNA, 1382 bp, Homo Sapiens
  NM_207584
gcccgcgcttccgtatcgctcctcgtaggccggggctcggcgcgcgcacccgcactaaagacgcttcttcccggcgggtaggaatcccgccggcgagccgaacagttccccgagcgcagcccgcggaccaccacccggccgcacgggccgcttttgtcccccgcccgccgcttctgtccgagaggccgcccgcgaggcgcatcctgaccgcgagcgtcgggtcccagagccgggcgcggctggggcccgaggctagcatctctcgggagccgcaaggcgagagctgcaaagatgtaaaagtcaagagaagactctaaaaatagcaaagatgcttttgagccagaatgccttcatcttcagatcacttaatttggttctcatggtgtatatcagcctcgtgtttggtatttcatatgattcgcctgattacacagatgaatcttgcactttcaagatatcattgcgaaatttccggtccatcttatcatgggaattaaaaaaccactccattgtaccaactcactatacattgctgtatacaatcatgagtaaaccagaagatttgaaggtggttaagaactgtgcaaataccacaagatcattttgtgacctcacagatgagtggagaagcacacacgaggcctatgtcaccgtcctagaaggattcagcgggaacacaacgttgttcagttgctcacacaatttctggctggccatagacatgtcttttgaaccaccagagtttgagattgttggttttaccaaccacattaatgtgatggtgaaatttccatctattgttgaggaagaattacagtttgatttatctctcgtcattgaagaacagtcagagggaattgttaagaagcataaacccgaaataaaaggaaacatgagtggaaatttcacctatatcattgacaagttaattccaaacacgaactactgtgtatctgtttatttagagcacagtgatgagcaagcagtaataaagtctcccttaaaatgcaccctccttccacctggccaggaatcagaatcagcagaatctgccaaaataggaggaataattactgtgtttttgatagcattggtcttgacaagcaccatagtgacactgaaatggattggttatatatgcttaagaaatagcctccccaaagtcttgaggcaaggtctcgctaagggctggaatgcagtggctattcacaggtgcagtcataatgcactacagtctgaaactcctgagctcaaacagtcgtcctgcctaagcttccccagtagctgggattacaagcgtgcatccctgtgccccagtgattaagttttattatgtagaaaataaagagcaaacagtacagctgaaaaaaaaaaaaaaaaaa

SEQ ID NO: 7081 - DNA, 2946 bp, Homo Sapiens
  NM_207629
gctttataaaggggagtttccctgcacaagctctctctcttgtctgccgccatgtgagacatgcctttcaccttccgccatgatcatgaggcttccccagccacatggaactaatgccagcagttactctgcagagatgacggagcccaagtcggtgtgtgtctcggtggatgaggtggtgtccagcaacatggaggccactgagacggacctgctgaatggacatctgaaaaaagtagataataacctcacggaagcccagcgcttctcctccttgcctcggagggcagctgtgaacattgaattcagggacctttcctattcggttcctgaaggaccctggtggaggaagaaaggatacaagaccctcctgaaaggaatttccgggaagttcaatagtggtgagttggtggccattatgggtccttccggggccgggaagtccacgctgatgaacatcctggctggatacagggagacgggcatgaagggggccgtcctcatcaacggcctgccccgggacctgcgctgcttccggaaggtgtcctgctacatcatgcaggatgacatgctgctgccgcatctcactgtgcaggaggccatgatggtgtcggcacatctgaagcttcaggagaaggatgaaggcagaagggaaatggtcaaggagatactgacagcgctgggcttgctgtcttgcgccaacacgcggaccgggagcctgtcaggtggtcagcgcaagcgcctggccatcgcgctggagctggtgaacaaccctccagtcatgttcttcgatgagcccaccagcggcctggacagcgcctcctgcttccaggtggtctcgctgatgaaagggctcgctcaagggggtcgctccatcatttgcaccatccaccagcccagcgccaaactcttcgagctgttcgaccagctttacgtcctgagtcaaggacaatgtgtgtaccggggaaaagtctgcaatcttgtgccatatttgagggatttgggtctgaactgcccaacctaccacaacccagcagattttgtcatggaggttgcatccggcgagtacggtgatcagaacagtcggctggtgagagcggttcgggagggcatgtgtgactcagaccacaagagagacctcgggggtgatgccgaggtgaacccttttctttggcaccggccctctgaagaggactcctcgtccatggaaggctgccacagcttctctgccagctgcctcacgcagttctgcatcctcttcaagaggaccttcctcagcatcatgagggactcggtcctgacacacctgcgcatcacctcgcacattgggatcggcctcctcattggcctgctgtacttggggatcgggaacgaagccaagaaggtcttgagcaactccggcttcctcttcttctccatgctgttcctcatgttcgcggccctcatgcctactgttctgacatttcccctggagatgggagtctttcttcgggaacacctgaactactggtacagcctgaaggcctactacctggccaagaccatggcagacgtgccctttcagatcatgttcccagtggcctactgcagcatcgtgtactggatgacgtcgcagccgtccgacgccgtgcgctttgtgctgtttgccgcgctgggcaccatgacctccctggtggcacagtccctgggcctgctgatcggagccgcctccacgtccctgcaggtggccactttcgtgggcccagtgacagccatcccggtgctcctgttctcggggttcttcgtcagcttcgacaccatccccacgtacctacagtggatgtcctacatctcctatgtcaggtatgggttcgaaggggtcatcctctccatctatggcttagaccgggaagatctgcactgtgacatcgacgagacgtgccacttccagaagtcggaggccatcctgcgggagctggacgtggaaaatgccaagctgtacctggacttcatcgtactcgggattttcttcatctccctccgcctcattgcctattttgtcctcaggtacaaaatccgggcagagaggtaaaacacctgaatgccaggaaacaggaagattagacactgtggccgagggcacgtctagaatcgaggaggcaagcctgtgcccgaccgacgacacagagactcttctgatccaacccctagaaccgcgttgggtttgtgggtgtctcgtgctcagccactctgcccagctgggttggatcttctctccattcccctttctagctttaactaggaagatgtaggcagattggtggtttttttttttttaacatacagaattttaaataccacaactggggcagaatttaaagctgcaacacagctggtgatgagaggcttcctcagtccagtcgctccttagcaccaggcaccgtgggtcctggatggggaactgcaagcagcctctcagctgatggctgcacagtcagatgtctggtggcagagagtccgagcatggagcgattccattttatgactgttgtttttcacattttcatctttctaaggtgtgtctcttttccaatgagaagtcatttttgcaagccaaaagtcgatcaatcgcattcattttaagaaattatacctttttagtacttgctgaagaatgattcagggtaaatcacatactttgtttagagaggcgaggggtttaaccgagtcacccagctggtctcatacatagacagcacttgtgaaggattgaatgcaggttccaggtggagggaagacgtggacaccatctccactgagccatgcagacatttttaaaagctatacaaaaaattgtgagaagacattggccaactctttcaaagtctttctttttccacgtgcttcttattttaagcgaaatatattgtttgtttcttcctaaaaaaaaaaaaaaaaaaaaaaaaa

SEQ ID NO: 7082 - DNA, 1240 bp, Homo Sapiens
  NM_207644
gtgggttcggcgaccatcgcgcggcggccatgggggcgcggctgggccggcgggccgggcccgaggctggctctgaggccggggcggcggccggctgcgggcccgcgccctacgagcgccgggtgcggtggctccgcgagatccagtccacgctccgcgagcggcggccggagcgcgcccggcagctgctgcgcctcctgcgccaggacctgggccttgagaggaccctccttcctgatatcctctacagagatgtggccttcctcaacccggtcgaccccatctcccatgacctgcttgtgaacctggcccgggacctgcagtgccccaagaaggactatgagctctggaagtcctcggacaagatctgccgacagctcatctaccacctcacccctcactcgaagcagcagcaagggtccagcctgcgccagaggaagacccagagctgcctcaagagcagcctccagaagactctgctggcaggggagactgtggacctctcaggcatcccgctgtcgacacaggacgtgcaacacatcacacgctacctgagcagccatggtgctgtgctggcggtgctggacctgagcttcacggggctgagtgatgagctgctgcacctcctgctgcccagcctgtgggcgctgccccgcctcacccagctcctgctcaacggcaaccgactgacgcgggccactgcccgcaagctcactgatgccatcaaggacaccaccaagttccctgctttggcttgggtggacctgggcaacaacgtggatgtggcttccctgccccagcccctgctggtcggcctgcgccggcggctgagccagcgcacctcactccccaccatctacgagggcctggaccttgagcctgagggcagtgcggccggggccaccacccctgcctccacctgggactccacagctgctgggctgggacccgagccccaggcctgctgtgccaggtgacccaccacccacctggctcattgctactgacttgtgatgctctcaagcacatgatagtgggcgatgaaggtcaaggaggactcacaggcccccagaaatccagtgtaaatgctcagcctgagattaaggggacagaagaatggactcataggtggccaggtggccagccctggctagaggctcagccttccctcagtgggaggggccccagcacccacagtgtggaccccgcaataaagagtgacacccgcctctgcttttct

SEQ ID NO: 7083 - DNA, 3737 bp, Homo Sapiens
  NM_207660
tgagcacaggtttcgcgggtagaaggcgtgcgcaggcgcggacacgggcgcatgcgcgttcactccggcgcgcagtgccggccggggcggggatacgccgtgtgcgcggccgggggcggaacggaggaggaggcggtggtgtcccggctgcggggtaggagtccgcggcagcctccgggtaagccaagcgccgcgcagtgctgagttcccgcacgccgcagagccatggagatcggcaccgagatcagccgcaagatccggagtgccattaaggggaaattacaagaattaggagcttatgttgatgaagaacttcctgattacattatggtgatggtggccaacaagaaaagtcaggaccaaatgacagaggatctgtccctgtttctagggaacaacacaattcgattcaccgtatggcttcatggtgtattagataaacttcgctctgttacaactgaaccctctagtctgaagtcttctgataccaacatctttgatagtaacgtgccttcaaacaagagcaatttcagtcggggagatgagaggaggcatgaagctgcagtgccaccacttgccattcctagcgcgagacctgaaaaaagagattccagagtttctacaagttcgcaggagtcaaaaaccacaaatgtcagacagacttacgatgatggagctgcaacccgactaatgtcaacagtgaaacctttgagggagccagcaccctctgaagatgtgattgatattaagccagaaccagatgatctcattgacgaagacctcaactttgtgcaggagaatcccttatctcagaaaaaacctacagtgacacttacatatggttcttctcgcccttctattgaaatttatcgaccacctgcaagtagaaatgcagatagtggtgttcatttaaacaggttgcaatttcaacagcagcagaatagtattcatgctgccaagcagcttgatatgcagagtagttgggtatatgaaacaggacgtttgtgtgaaccagaggtgcttaacagcttagaagaaacgtatagtccgttctttagaaacaactcggagaaaatgagtatggaggatgaaaactttcggaagagaaagttgcctgtggtaagttcagttgttaaagtaaaaaaattcaatcatgatggagaagaggaggaagaagatgatgattacgggtctcgaacaggaagcatctccagcagtgtgtctgtgcctgcaaagcctgaaaggagaccttctcttccaccttctaaacaagctaacaagaatctgattttgaaggctatatctgaagctcaagaatccgtaacaaaaacaactaactactctacagttccacagaaacagacacttccagttgctcccagaactcgaacttctcaagaagaattgctagcagaagtggtccagggacaaagtaggacccccagaataagtccccccattaaagaagaggaaacaaaaggagattctgtagaaaaaaatcaagctgagatgagtgaactgagtgtggcacagaaaccagaaaaacttttggagcgctgcaagtactggcctgcttgtaaaaatggggatgagtgtgcctaccatcaccccatctcaccctgcaaagccttccccaattgtaaatttgctgaaaaatgtttgtttgttcacccaaattgtaaatatgatgcaaagtgtactaaaccagattgtcccttcactcatgtgagtagaagaattccagtactgtctccaaaaccagttgcaccaccagcaccaccttccagtagtcagctctgccgttacttccctgcttgtaagaagatggaatgtcccttctatcatccaaaacattgtaggtttaacactcaatgtacaagaccggactgcacattctaccatcccaccattaatgtcccaccacgacatgccttgaaatggattcgacctcaaaccagcgaatagcacccagtcctgcctggcagaagatcatgcagtttggaagttttcatgtactgatgaaagatactctacagaacttgtcaaatctttgaaacttggaatatattgctttcataatatgaagttttattgcctatctatctgaagtgtctaatttttcaagtttgtaagtttattatgtggttttaacattgggtgtttttgttttgtttttactatgaaaagacagcttaaggaagagctaaattctgttaaaatatttggggcatgtttgtgcactgctgttgtgaggatcagcatatgaaattgacatcatggttagtcatggtactgcagcttagggggctacacggttgctgtgtgagtggagagatgcagtgaggcagttgtcattattctaaaaattgtactactttcacttttcccaaagattatataatgttcataatccaccatgaaaacagcattggccaaaggtactgaggctgcttaaaatattcaattctgctttttaatttttaagtgaatttagtttgaaaagcatgattatacaggcctctcaggctgagtgctactttggtaaagttcccagttttcctgccttctgtgacaggatgaatgaggtgggtatggacagtggaggcagctggaatggcaagtgcagaaaataggaacagttctatacagtgctctcatttactaataacataatgccttctaaataatttttttgggaaactacattatcacaaaattatacaaatttttttacaagtatttacatactgtatctgaaaacagactttaaagtcacaagattataaatgtacatatatattctcacattctgaaaaataacattctcagaatccacagaaaatatacttagttactactgaagataatttttgaaatgtaaaaattagatttaaatagtatattttaaatgacagaactataattacagagatcagatcagataggtaaactgcaagatagataggatgaaacttttggcctactgtattacttacagagtttttttgtgtgtggtttttaaaactgttaaggcaagaagtgtcaaatgctttagagttaaataacagatcactgatttcaaagacttggtgtatagtgttaaaaattaaagcttaaaaggtggttagaaaagtggattaatgcaaaaggggtaataaagactgcaacattctcaggaccaaattaaactgctaaaaaaaaaaaaaaagttcattgacttgcttagtcgtatactcaaatgatgataaacctacatgtgcaaaggctcacgtttaagattgtcaagccagcagtctactgttgtgttgccattgcttttccattgggagaagaaagaattaaccagtcattaaaccatttggtaagttgcactttgctgtgctgatcccacaggaaaggcttgaaacacgagaagcagcaaagacagagcacacaagtgcataaggctgttgtcttcggcttgggtgaaatgacagttcctcttcattctaaaggtttactccattgaatttaaggcatttgttcattccagtgttgagatgctttgcatctctgcagaagaaatttattttaaattgtttaaatatctggaaatacttttagctatcatttataaagatagttttgttctcagtttcactataaattatagaacaaatgggaaacaagggtttaatttagttcagccattttacaaggaaataataaaatactaaaatctgaaaaaaaaaaaaaaa

SEQ ID NO: 7084 - DNA, 1756 bp, Homo Sapiens
  NM_212461
ggatgtggggcggggcctgccccaagagagtttcctaaagcgaggaaaccaagccgggcgcctcttgcaatggagacggtcatttcttcagatagctccccagctgtggaaaatgagcatcctcaagagaccccagaatccaacaatagcgtgtatacttccttcatgaagtctcatcgctgctatgacctgattcccacaagctccaaattggttgtatttgatacgtccctgcagtcctgcccctgtggatttgcctttatgattattactgtcttggctacaggtgaagaaagctttttttgctttggtgactaacggtgtacgagctgcccctttatgggatagtaagaagcaaagttttgtgggcatgctgaccatcactgatttcatcaatatcctgcaccgctactataaatcagccttggtacagatctatgagctagaagaacacaagatagaaacttggagagaggtgtatctccaggactcctttaaaccgcttgtctgcatttctcctaatgccagcttgtttgatgctgtctcttcattaattcggaacaagatccacaggctgccagttattgacccagaatcaggcaatactttgtacatcctcacccacaagcgcattctgaagttcctcaaattgtttatcactgagttccccaagccagagttcatgtccaagtctctggaagagctacagattggcacctatgccaatattgctatggttcgcactaccacccccgtctatgtggctctggggatttttgtacagcatcgagtctcagccctgccagtggtggatgagaaggggcgtgtggtggacatctactccaagtttgatgttatcaatctggcagcagaaaagacctacaacaacctagatgtatctgtgactaaagccttgcaacatcgatcacattactttgagggtgttctcaagtgctacctgcatgagactctggagaccatcatcaacaggctagtggaagcagaggttcaccgacttgtagtggtggatgaaaatgatgtggtcaagggaattgtatcactgtctgacatcctgcaggccctggtgctcacaggtggagagaagaagccctgagctgggggaaggggtcatgcagcaccaggggatatgcccaactcactgcctgctggaagctctgtgggaatcagatgaaacttgagggaattgtgactctgttccctgttcagggtcccctgcccttctatctgggagctagggaaggtatgggggaggaaagagaatggatttatagctacccttaccctcacacatacacttgaaaaaactttcagcctagccagttctagcccctgtcctcttagatatatccccctttctgggtgaactataggctctgtgcctctcagacaaattctgatctctaagagatccccagacctcacttgcctctgcctccatcttggccctgattcaaccctaagataatagcacaacaaaattcttcataaagatatttttattcacctgttccgtgctatatggaggaggccaagtccatttagtgacatttcttcccataatgtgagtggggaggattgtggggaggaggggctttgggttcctgtgtttgtgcatatgaagggagatgggggttaggtggaggaggagagcagcgtggttagctaaggttattgctttttgtggcaaatctaattaaatgacaggaatctcttcacgataaaaaaaaaaaaaaaa

SEQ ID NO: 7085 - DNA, 3657 bp, Homo Sapiens
  NM_212472
gattggctgcggccaggccgtttccggtggagctgtcgcctagccgctatcgcagagtggagcggggctgggagcaaagcgctgagggagctcggtacgccgccgcctcgcacccgcagcctcgcgcccgccgccgcccgtccccaggtgagtggggtcggccgggggctcaggcgagagaaccatggagtctggcagtaccgccgccagtgaggaggcacgcagccttcgagaatgtgagctctacgtccagaagcataacattcaagcgctgctcaaagattctattgtgcagttgtgcactgctcgacctgagagacccatggcattcctcagggaatactttgagaggttggagaaggaggaggcaaaacagattcagaatctgcagaaagcaggcactcgtacagactcaagggaggatgagatttctcctcctccacccaacccagtggttaaaggtaggaggcgacgaggtgctatcagcgctgaggtctacacggaggaagatgcggcatcctatgttagaaaggttataccaaaagattacaagacaatggccgctttagccaaagccattgaaaagaatgtgctgttttcacatcttgatgataatgagagaagtgatatttttgatgccatgttttcggtctcctttatcgcaggagagactgtgattcagcaaggtgatgaaggggataacttctatgtgattgatcaaggagagacggatgtctatgttaacaatgaatgggcaaccagtgttggggaaggagggagctttggagaacttgctttgatttatggaacaccgagagcagccactgtcaaagcaaagacaaatgtgaaattgtggggcatcgaccgagacagctatagaagaatcctcatgggaagcacactgagaaagcggaagatgtatgaggaattccttagtaaagtctctattttagagtctctggacaagtgggaacgtcttacggtagctgatgcattggaaccagtgcagtttgaagatgggcagaagattgtggtgcagggagaaccaggggatgagttcttcattattttagaggggtcagctgctgtgctacaacgtcggtcagaaaatgaagagtttgttgaagtgggaagattggggccttctgattattttggtgaaattgcactactgatgaatcgtcctcgtgctgccacagttgttgctcgtggccccttgaagtgcgttaagctggaccgacctagatttgaacgtgttcttggcccatgctcagacatcctcaaacgaaacatccagcagtacaacagttttgtgtcactgtctgtctgaaatctgcctcctgtgcctcccttttctcctctccccaatccatgcttcactcatgcaaactgctttattttccctacttgcagcgccaagtggccactggcatcgcagcttcctgtctgtttatatattgaaagttgcttttattgcaccattttcaatttggagcattaactaaatgctcatacacagttaaataaatagaaagagttctatggagactttgctgttactgcttctctttgtgcagtgttagtattcaccctgggcagtgagtgccatgctttttggtgagggcagatcccagcacctattgaattaccatagagtaatgatgtaacagtgcaagattttttttttaagtgacataattgtccagttataagcgtatttagactgtggccatatatgctgtatttctttgtagaataaatggtttctcattaaactctaaagattagggaaaatggatatagaaaatcttagtatagtagaaagacatctgcctgtaattaaactagtttaagggtggaaaaatgcccatttttgctaattatcaatgggatatgattggttcagtttttttttttccagagttgttgtttgccaagctaatctgcctggttttatttatatcttgttattaatgtttcttctccaattctgaaatacttttgagtatggctatctatacctgccttttaagtttgaaactaactcatagattgcaaatattggttagtatttaactacatctgcctcggctcacaaattccgattagacctttatccagctagtgccaaataattgatcagatgctgaattgagaataagaatttgaggtctacattcttggttgttaatttagagcgtttggttaaagtatgtccttcagctgactccagtataatctcctctgctcattaaactgattccaggagattggatttgctgtgactagatacagatggagcaaatgtcctaacagagaaatagaggtgatgctgctaaagggagaaatgccaggcggacaaagttcagtgtcgggaattttccccgtgacattcactggggcatgagattttggaagaagttttttactttggtttagtctttttttccttcctttttattcagctagaatttctggtgggttgatggtagggtataatgtgtctgtgttgcttcaaattggtctgaaaggctatcctgctgaaagtcctgctttcctatctagcatttatttctctggcaaacttttctttcttttcttttttaaagtaaacttgtgtattgagtcttaactgtatttcagtattttccagccttatgtgttacattattccaatgatacccaacagtttatttttattatttttttaaacaaaatttcacagttctgtaatgtaggcacttttattttcattgtgatttatatataaggtaatgtagggttatatttgggagtgactgcaagcatttttccatctgtgtgcaactaactgactctgttattgatcccttctcctgccctttcccaggtaatttaaattggtcatggtagatttttttcatagatttgaaaaacttttaggttgttaccaagtatgaagtataaatctggggaagaggttttatttacattttagggtgggtaagaaagccaccttgttacaaattttttaatttccaaaataatctatattaaatgagggtttctgatctgtactttgtgtttagctacctttttatatttaaaaaattaaaaatgaaaattacgttcttacaagcttaaagcttgatttgatctttgtttaaatgccaaaatgtacttaaatgagttacttagaatgccataaaattgcagtttcatgtatgtatataatcatgctcatgtatatttagttacgtataatgctttctgagtgagttttactcttaaatcatttggttaaatcatttggcttgctgtttactcccttctgtagtttttaattaaaaactttaaagataagtctacattaaacaatgatcacatctaaagctttatctttgtgtaatctaagtatatgtgagaaatcagaattggcataatttgtcttagttgatattcaaggctttaaaagtcattattcctgggcttggtaagtgaatttatgagatttactgctctagaaagtatagatggccaaaggaccgttttgtattgcttcctgattaccagtctgattataccatgtgtgctaatatactttttttgttatagattgtcttaatggtaggtcaagtaataaaaagagatgaaataatttaaattcttaaaaaaaaa

SEQ ID NO: 7086 - DNA, 2223 bp, Homo Sapiens
  NM_212481
ccggcgggccgcgccgcgagccagtatctcagagagcgcggggtccggacagccgcgcgctgagggtctcggggcgggcgccgcgggacctctccgggccatggcagcccctgtcaaagggaacaggaagcagtccacggagggtgacgccctagacccacctgcatcccccaaacctgctggcaagcagaacggaatccagaaccccatctcgctggaggactcccccgaggcaggcggggagcgggaggaggagcaggagcgggaggaggagcaggccttcctggtcagcctctacaagttcatgaaggagcgacacacgcccatcgagagggtgccccatctcggcttcaagcagattaacctgtggaagatctacaaagcagtggagaagctgggggcctatgagctggtgaccgggcgccgcctctggaagaacgtgtacgacgagctggggggcagcccaggcagcaccagcgcggccacgtgcacgcgccgccactacgagaggctggtcctgccatacgtgcggcacctgaagggggaggatgacaagccgctgcccacctccaagcccaggaaacagtacaagatggctaaggagaacaggggggatgatggggccaccgagaggccgaagaaggccaaggaggagcggcgcatggaccagatgatgccaggaaagaccaaagcagatgctgctgacccagcaccacttcccagccaggagccccccaggaacagcacagaacagcagggcctggcctctgggtcttctgtgtcctttgtgggtgccagcggctgtcctgaggcctacaagcggctcctatccagcttctactgcaaggggacacacggcatcatgtcaccactggccaaaaagaagctcctggcccaggtgagcaaggtggaggccttgcagtgccaggaggagggctgccgccatggggcagagccccaggcgtccccagctgttcacctcccagagagtccccagagccccaaagggctgactgagaactccaggcaccggctgacccctcaggagggattgcaggccccaggtggcagcctcagagaggaggcgcaggcaggcccctgcccggcagcccccatcttcaagggctgcttctacacccaccccaccgaggtgctgaagcctgtcagccagcaccccagggacttcttctctagacttaaagatggggtgctattggggcctcctggcaaagaggggctgtcagtgaaagagccccagctggtgtggggcggagacgctaaccgcccttctgcgttccataaaggtggctccagaaagggcatcctctaccccaagcccaaagcctgctgggtgtcccccatggccaaggtcccagccgagagccccacgctcccgcccaccttccccagtagcccaggcctgggcagcaagcgcagcctggaggaagagggtgctgcccacagtgggaagagactgcgggccgtgtctccctttcttaaggaggcggatgccaagaagtgtggggccaaacctgcagggtccggcctggtctcctgccttctgggcccagccctggggcctgtgcccccagaggcctacaggggcaccatgctgcactgcccgctgaacttcactggcaccccgggccccttgaagggccaggctgcactccccttcagccccctggtcatcccggccttcccggcccacttcctggccaccgcaggcccctcgcccatggccgctggcctgatgcacttccccccaacgtccttcgacagtgccctccgccacagactttgcccggcctcatctgcctggcacgcaccaccagtcacaacctatgcagcgccccacttcttccacctcaacaccaagctgtaggccagcccatggtgttgtgtacactgtggagtcgacaggggcctacaacaggcaggtactgctgccagggggctctgaactagtgcctgctacccaggacacccgggccatgcccctggctgggcagcctggcacaagtgaagaagaaggcagtgggaaaactgggtttatctcaaggcagcagcctgagcccaggagcagaggacccagttgttataaggcgctgggagaggatgggcagctcccactgccccagagcggagctcgaagcacccaggttgcccacggaaaatccaataaaaagacaccagtgtgaatccaaaaaaaaaaaaaaaaaa

SEQ ID NO: 7087 - DNA, 3408 bp, Homo Sapiens
  NM_213566
acatctcccggcaggctgcggaagggggtcgagtagaaggaccgccgctccggcctcccgcgacttctcgaaggtgggcaggtcccaccttgtggaggatggaggtgaccggggacgccggggtaccagaatctggcgagatccggactctaaagccgtgtctgctgcgccgcaactacagccgcgaacagcacggcgtggccgcctcctgcctcgaagacctgaggagcaaggcctgtgacattctggccattgataagtccctgacaccagtcaccctggtcctggcagaggatggcaccatagtggatgatgacgattactttctgtgtctaccttccaatactaagtttgtggcattggctagtaatgagaaatgggcatacaacaattcagatggaggtacagcttggatttcccaagagtcctttgatgtagatgaaacagacagcggggcagggttgaagtggaagaatgtggccaggcagctgaaagaagatctgtccagcatcatcctcctatcagaggaggacctccagatgcttgttgacgctccctgctcagacctggctcaggaactacgtcagagttgtgccaccgtccagcggctgcagcacacactccaacaggtgcttgaccaaagagaggaagtgcgtcagtccaagcagctcctgcagctgtacctccaggctttggagaaagagggcagcctcttgtcaaagcaggaagagtccaaagctgcctttggtgaggaggtggatgcagtagacacgggtatcagcagagagacctcctcggacgttgcgctggcgagccacatccttactgcactgagggagaagcaggctccagagctgagcttatctagtcaggatttggaggtgggcggaaaccagggtcactgagctacagaggaggacatgccctgggatgtagtagtatcatgcagaggtgtgtgggcccttttgttcacctctgcagactgtgaatcctagctgccagtttgcctattatatgccaaggcatttgcaaaaatctcattaatctaaatcaaaatagctttaaagaaaaatgcatacacttcctcagatcatcaaacagactctggtccaaggttggtaatgaaatgactgttcctgacagggaggaatagcagggcccaatcttctgagatggcttctgggtctttccatggtcagagaagatctatagtccgtcctgaggtctgtcaatgtcacaggaaaaggcaaacttgaggggatcgtcgcctgctggctaagaccagggagctaaaaacttgaggaagggaacctgcctgggtgggtgctacttctgattcattgtccttgtccctgtcataagtacctccctattgtagatagaagggaaggaaactgttgacttgagcttggctaaatttcctgaaggtggaggaccttagagttgctccaagtaaactttccaaggacttcttcctgttggtgttgtaagaaaaggcccatgcttgtccgggcacagtggcttacgcctgttaatgccagtactttgggaggccgaggcaggtggatcacctgaggtcaggagttcgagaccagcctgaccaacatggcgaaaccccatctctactaaaaatacaaaaattagcctggcatggtggtgggaggctgaagcaagagaatcacttgaacccaggaggtggaggttgcgtgagctaagatcgcgccactgcactccagcctgggcgacaagagtgaaactccgtcttaaaaaagcccatggcaggctgggcgcggtggctcacgcctgtaatcccagcactttgggaggccaaggtgggcggatcacaaggtcaggagatcgagaccatcctggcgaacacggtgaaaccccgtctctactaaaaaaaatacaaaaaaattagccaggcgtggtcgtgggcacctgtagtcccagctactcagggggctgaggcaggagaatggcgtgaatccgggaggcggagcttgcagggagccgagatagtgtcactgcactccagcctgggtgacagagcgagactccgtctcaaaaaacaaaaagcccgtggcaattaatggtaaaggaaacccggcatttcagtgtaaagaggtaacataaacggatactgcctcattgcactccccaaaagagagtcaggagagcagcaggagaggcgcacagaaggcccagttctcaggggtttttattcttgctgcagttggttaccaaggaagaccccaaagcactggctgttgccttgaactgggacataaagaagacggagactgttcaggaggcctgtgagcgggagctcgccctgcgcctgcagcagacgcagagcttgcattctctccggagcatctcagcaagcaaggcctcaccacctggtgacctgcagaatcctaagcgagccagacaggatcccacatagcagcagcgggaagtgtgccaaggaagctctgtggcgttgtgttattggtagacaccctcagcctcatcatttgactacctatgtactactctaccccctgccttagagcaccttccagagaagctattccaggtctcaacatacgccgttccaccaattttttttttagccccaccagcttcaggacttctgccaattttgaatgatatagctgcaccaacaatatcccgcctcctctaattacatatgatgttctctgttcaaaagtaattggcagtgattggccaggcgcagtggctcacgcctgtaatcccagcactgggaggccgaggggggcggatcgtgaagtcaggagatcgagaccatcctggctaacatggtgaaaccctgtctctactaaaaatacaaaaaaaattagccagccatggtggcgggcgcctgtaatcccagctacttgggaggctgaggcaggagaatggcatgaacctgggaggcagagcttgcagtgagctgagattgcgccactgcactccagcctgggcaacagagcgagactccgtctcaaaaaaaaaaaaaaaaaaagtaattggcagtgactatgggcgcactgcctaacatttagccctgccccatatggaacatgttaaaaaaaaaaaaagccaggccgagcgtgttggctcacgcttgtaatcccagcactttgggaggccgaggcgggtggatcacgaggtcaggagatcgagaccatcctggctaacacagtgaaacgtgtttttactaaaagtacaaaaaactagctgggcgtggtggcaggagcctgtagtcccagctactcgggaggctgaggcaggagaattgcttgaaccggggaggcagaagttgcagtgagccgagattatgccactgtactccagcctgggtgacagagtgacactctgtctcaaaaaaaaaaaaaaaaa

SEQ ID NO: 7088 - DNA, 9615 bp, Homo Sapiens
  NM_213589
gcggccgccccgcccccgctcccgccgccgcccgccagtcagtcagtcagtcagtcagtcagtcagtcagtcagtcactgagcgcgcggcgcgggagctgctggcagtcgctgcgtctctggcgagggagcgccgcgcctggggaggaggcggaggcagcggctggaggagcgcgagcggcggtttccttgcccggggccgcgggaaggccgaccgactgccgcgatggagcagctatcagatgaagaaattgatcatggtgctgaagaagacagtgacaaggaagatcaggacctggacaaaatgtttggagcctggcttggagaactagacaaactcactcagagtttggattctgacaagcccatggaaccagtaaaaagatctcctcttcgccaggaaacaaacatggccaacttttcttaccgcttctccatatacaacttgaatgaagctctgaatcagggagagactgtggatctggatgccttgatggctgatctttgctctatagagcaggagctcagcagcattggttcaggaaacagtaagcgtcaaatcacagaaacgaaagctactcagaaattgcctgttagccgacatacattgaaacatggcaccttgaaaggattatcttcttcatctaataggatagctaaaccttcccatgccagctactccttggacgacgtcactgcacagttagaacaggcctctttgagtatggatgaggctgctcagcaatctgtactagaagatactaaacccttagtaactaatcagcacagaagaaccgcgtcagcaggcacagtgagtgatgctgaagtacactctattagtaattcctcccattccagcatcacttccgcagcctccagcatggactctttggatattgataaagtaacacgccctcaagagctggatttgacacatcaagggcagccaattactgaggaagaacaggcagcaaaattgaaagctgagaagatcagagttgccctagagaaaattaaagaggcacaagtgaaaaagctggtgatcagagtccacatgtctgatgacagttctaaaacaatgatggtggatgagaggcagacagtaagacaagtactggataacctgatggacaaatcccactgcggttatagtttagactggtcactggtagaaaccgtttctgaattacaaatggagagaatctttgaagaccatgaaaacttggttgaaaatcttcttaattggacaagagatagccaaaacaagcttatatttatggagcgtatagaaaaatatgcacttttcaaaaacccacagaattatcttttggggaaaaaagaaacagctgagatggcagatagaaacaaagaagtcctcttggaggaatgtttttgtggaagttctgtaactgtaccagaaattgaaggagtcctttggttgaaggatgatggcaagaagtcctggaaaaagcgttattttctcttgcgagcatctggtatctactatgttcccaaaggaaaagcaaaggtctctcgggatctggtgtgctttctccagctggatcatgtcaacgtttattatggccaggactatcggaacaaatacaaagcacctacagactattgtctggtgctgaagcatccacaaatccagaagaaatctcaatatatcaaatacctttgttgtgatgatgtgaggacactgcatcagtgggtcaatgggatccgcattgcaaagtatgggaagcagctctatatgaactaccaagaagccttgaagaggacagagtcagcctatgattggacttccttatccagctccagcattaaatcgggatccagttcttccagcatcccagagtctcagtcaaaccactccaatcagtctgatagcggagtttctgacacccagccagcaggacacgtccgttcccagagcattgtgagctccgtattctctgaagcctggaaacgaggcactcagttggaagagtccagcaaggccagaatggagtctatgaatcggccctacacttcacttgtgccccctttatccccgcaacctaagatagtcaccccctacactgcttcacagccttcaccacctctacctcctccgccacccccacctcctcctccaccaccccctccaccaccccctcctcccccactccccagccagtctgcaccttctgcaggctcagcagccccaatgttcgtcaagtacagcacaataacacggctacagaatgcgtctcagcattcaggggccctgtttaagccgccaacacccccagtgatgcagtcacagtcagtgaagcctcagatcctggtaccccccaatggagttgttccaccaccccctccccctcctccacccccaaccccaggctctgccatggcccagctaaagcctgcaccgtgtgccccatcccttccacagttcagtgccccgcctcctccactgaagatccatcaagttcagcatattactcaggtggctcccccaacaccccccccacctcctcctatccctgcacccctccctccccaagctcccccaaaaccccttgtgaccatccccgcaccaaccagcaccaagactgtggcacctgttgtgactcaagctgcaccacccacacctactcctccagtgcccccagcaaaaaagcagccagctttccctgcttcttacattccaccctctccccctacccctcctgttccagtacccccgccaacattacccaagcaacagagcttctgtgcaaaaccccctccctctccactgtcaccggtgccctcggtcgtgaagcagatagccagccagtttccaccccctccaactccccctgccatggaatctcagcccttaaagcctgtcccagcaaatgtagctccacagtcccctcctgcagtaaaagcaaagcccaagtggcagcccagctccatcccagtcccttctccggacttccctcctccccctcctgaaagcagcctggtgtttcctcctccacccccatcacctgtcccagccccaccaccgccacctccacccacagcttctcctacccctgacaaaagtggatctccaggcaaaaagaccagtaagacgtccagccctgggggaaagaaaccacccccaaccccacagcgcaactccagcattaaatccagcagtggtgcagagcaccccgagcccaagagaccctcggtggacagtctagtcagcaagtttacaccgccagcagaatcagggtctcccagcaaggagaccctaccacctcctgcagcaccccccaagcctggaaaactcaatctttctggagtcaaccttcctggagttctccaacaagggtgtgtgtcagcaaaagcccctgttctgagtgggcgtggaaaggactccgtggtggaatttccttctcctccatccgattctgattttccaccccctccacctgaaacagagcttcctctgccccccattgagattccagcagttttctcgggaaacacctctccaaaagtggcagtcgttaatcctcaaccacaacaatggtctaaaatgtcagtgaagaaggcccctccacccacacgacccaaacggaatgatagcacccgcctcactcaagctgagatttctgagcagccaacaatggccacagttgtgccacaagtgcccacctctcccaaatccagccttagtgtccagcctggattcctggctgacctcaacaggacactgcaacgaaagtccatcactcggcacggctcactctcctcccgcatgtccagagcagaaccaacagccaccatggatgatatggcattgcctccaccaccccctgaactgctgtctgatcaacagaaggctggttacggaggcagtcatatatcaggctatgcaacgttgcggagaggaccccctcctgctccccccaaaagagaccagaacaccaagctctccagagactggtagccaccataggactttattttcatgatatctgtaatcactgctacaatcagctcacctgatcatctgtgaattcaggtgttcagagcctcctggtatgatgttattcaggtagtgtccagctatatgtgtatgtgtgtgtgtacacgtgcatgtacacacagctgtacagtgtgtgtatatatgtatacatatatgtatgtgtatgtgtatatagagagagagctgagagttattctatttattccttttctctcctaatctgaaaatgggtgttctgtattttgggtggaagaggcatagaaggggatgtgtgttgtctcttaagatttctatatcatgtggattggaccaaaaacttctaatcacttatttagaaggtatttataagtgtctgtccatgtgtagcctattcgtgcatgttgtgtattatataactaaggaatagatgtagaatgtgctatttctggttgagaaaaatcaccagaatgtttggtgtatctataaggcttttgtgtttgtttttccccagttggctgaagttagaattgcttgactgacacttcattgctatacatgaaggggcactttaaatcaggaaaatctctcagcttcatagaacgggtaactagtgcaggatggggaaatgttcacagacatcatctgtatgtggttgtgcatagaaagtaaatacatggcgtaattaactcagctgttctagctgcagtactgctgcagtgatccacccacatttaggatgtgctgacagataagctctttgcctacaatacatggataattagtgctataattctggatagttcctttttagtactgttttatgaagctttatcaacttggcttcatgatcctcactttgattgattttaagaggatggataacacagttatctctgtaatgttctgtcccagtatgtctttgggtcaccagttaccttcttaaaatatgtgctttaggtaggtgttattacatatctgtagacaattggtatatgaaatatacacatcctgtgccccaatatggtgcattatgaaaaacaaaatcattttctaaaatgcattttttgagcattgctctatagaagggaagggtgatgagagaacagaactggcccctgtacaggtgtcattaatctggttgtatatgggttataatatgtaatacaaaaagctcattaagtatgggactacatggagagggaagacagtttcatttatagctactggggctaccaggacccttgctgactgcagcctggttgtgattagttcaggttactaggtgttctgatggagtgggacagtccaagtccagtaactgacattacgttttatgcgtgtgcagtttggtataacgtggagtcagtgctctaacgacacactatacttctatatgcttttttctgtgaattttccttggtacatgagagaaataagtactctcatcaacttatgataaattggactattaggaataaaacaatctcagagcagctcctaaacaagagaataaaaatgggccatcccagcacttataaggggagcacatcttgtaatgaaagtctgtgcctattgttaatgattaccaatgcaaactgcagaaatcagttgacattgtcccacaaggaaaaagtgatgccagtaaagtgggggaagagatggtaaataattctagaatgagcaaaagtgcttaattagtacagtatactcaaggtcttgcataacccacactccacgaaaaccgcatcgtaaacagagagtgaacagcacctctccattgctacatctccagaatattgttcggttatgttcatgtggttatggagcaataagaatatataccattaatttttaggtctttcaaattgttcaccaagttttgtgtttgatatttatgaagtgatctttaacacatctgcattgttaatttaagcatgcacagaaatttgggtaatgtttgagtagattgccaagcgctactgtgattcatgaatgaatttctcatagtcttctgcctgcagttttatagtttgaggggcacccatatttgtgggttagagttagtaagaatatgaatccagttatcaaagtattcatccctgaggttttgagttttattgtggtggtgattttctcatgagaaggtagacaacacttcagtttttcttgagggggaaaaaatgtacccgctaaccttttttcacccatgatttgagccctaaaacaacagcctttatgttttcagtgcaggatttcttggaatttcttgcttgtatcaatcctgatgatagccatcctgaacagatgcttctggtctgttttcctggaatagcagacatccttttgaacactaatgatgccaggaagagagtaaggctagaggaggagactcattttaaccccagtccagtggcttgtccgacaacaggccatttccctttacattcctccacagacagaaatggctattaaaaatgttttaacctcatgtatgaactgaatttaaaaaaccactaaagtgatactttatacttctgttttactccctagtgggttttctttaatttggatttttgttgggatgtagcttttcctagactgtatttctgtagctctttttctctggtgtattcatggaaagcatctactgccgcacgacactagtactgtgccttctttcactgccctctgctctgcagctctcacccagcttggctgcttcaagtctgtgcagttgacttggctgtactgaaaagtgaacagcatggattaactcatcctgctgctgagggcagtgcaaacaggtgcttattagaggtagtgacttgcttaattagtgacactcctaatttctactatggataatttcaaagtagaatcactctatgcttagagttttggcaccaatgctgtagggcagcagaatctattctcagtaaaataacttatggtttattagatattctgtattggattttaccagcttgacttttactgctcagatgctttctttcccccccttagacgctgtaattctcttgggaagagtaactattcttaaggtttttacagatacccaccttagttgtaaattggatagtttatatttctgggactttttaaatgaaaatgtggaatgttaagttacaaaagacttttcatcagaaaatttcaaacaaagtaaacatggcgttttatagtcctctaaaatctaggtgctcccacccaccaaaggcatatcctgcaaagggctgtgaactatcttggtgaactgtcttgggtcccctttccatgtatgttttcttgtcactgaaaacaaacaacgctgagtttatcaagaaaatttaaattgggggatcataataattccaaccaagtgacaactctgacatcaaggttattaggagctgtacatccaattcaagttttatttgctgctattctgggagaataaacttgtatatggagaataaactaataaacttgtatcgaggaaatccataaagttataaattagcctgaaaaatatttcaggtaatggtgtggattggcctgctttgactctcagccaccaacagaaatctttgtcacctttgttcctcagctaaaagtaattttgttataaacacaaagtgactttaaacaggtaaaaaacccattcctatttttgtacattaccaaaagtttttcatatacctacagagctaactaattacaactgatttaatccactcaagtttagaccagttaaacccataggatcctgtatggttatcaatgtgatgccttgcttttcataaaataggtataattgggtcatacacttgacgagagggtgactgtttctaggggaagaaaaccctttagattgcaggtaactttcacttttttttttttaatatacactttacatttgtataaattatgcagggtactcctaaccctgtagaaatgtatgacctctcacaaagttgagatttgatccaaagagaaatgcaagtataaaagaattagatacttattatcttttaaggtttttttttttttttggtagagatgggggtctcactgtgttgcccaggctggtctcaaactcctggccacaagtgatcttcctgcctcagcctcccaaaatgctgagattacaggcatgagccactgtacccagcctttccttataaaattcaaagagaaaatttctacacctttatccctcaaataaaacaagtgctcagttcttaccgtgcccttgcaaggtctatatgtaaaagaaatctgaaatttagctgtagaataaaacttgataaataaaaagaaaaaacatacatttctccagttggtttgctctttgcttgttgaagtaataaaccgttttaaagagaaaatacttgctgtaaacccccagtgccttcaactcttttggcagaatatttttaaagaaatccagcaagcaaactttgaggtgctaatgaaagtaaaggaaggtggtatttctagttttggcagaaatgaaaagtgtctcacaagagacatcactacccacgtggggtctggctgctttctaccaaagacatttagagaagtgaattgagtcagggtgatggtgaacactacatattttatagatggttaagttgagaattaattatgtttatcatggatggctactaataccaagctcatgattgttgcagcctcaacgtcttaggcagtaaaacttgtctgcagcactaaagggggagaaacccttatattttgcaaactgtccattcgttaaatttattgtaacctaataccaaaaactgccgtttttcatattatttccccacctcctacttttttttttttttttgctacttgtaaaataaccccttctagaaaataagcattaactggaatgtttcaaacaattttgcttcattttactatcagccactagtgaactcttacagagatgtacatttaagataaaattagcttgtgctaagtgttttaaaaacattgtttactgttaaaggggaattgcacattatatttaactgggattgctccctccctcagttctttaaaaaacaagagtcaaggctcacaccaacttgtaggctgtgggagctttgccataggtagatacaatgtagaagtatacttttttaaagcatgaagaagacaaggaacttcattataatgtaccaggtagaggacattattattcaaaggattatgcacagctcagtgaagatgaagttacaatttttctcgcagctttgttgctattattttcttctgcataaatgtatgctcatttcattatgtgccttgctccctgattgtgcaaagctatatatatatatatatatatatagatagatagatagatatatgagagagatatattcagtactactgaggatgtttttctgaggatgtttttgttctgctggattaagttattttccaagttactcttgccagttatgtcagtaaactattgtaatggcttagcacactagtcgtacagtcagtgtaaatgtttttcatttacatgttttcattatatcagcttatcaaatccttaataaaaaaaattcatagatttcatttaaaaaaaaaaaaaaaaaa

SEQ ID NO: 7089 - DNA, 1964 bp, Homo Sapiens
  NM_213597
tgctgcatgccttcattcctggtgccctctcttgtctcttccccagtcctgctgaagctgctctttagcccaggccccaagactatatggtccctgtggcagcagccaatgttgtttcaggaagcaacagcatttgaaaatatgaccaaagattggaattatttagaaggctctcaaaaggattgctacagagacacaatgctggacagttatgagaacacggtcccacagggatccttcttacagctctccatgatgcctcagagagctggaaatgatccacctggggtttcaaatgcaagtgaaatggaaatggagataagtaacatgagagaaaagtttcttatgagtgtaacaaagttagtagaaagcaaaagttacaacagcaaggtattttccaaagaaaagtactttcaaacaataaaggaagttaaagaagctaaagaaaaagggaagaagtcatcacgtgattatcgccgtgcagcaaaatatgatgtgatctctgtacagggcacagagaaactgatagaggctactcatggagaacgtgatcgaatacggtattatgtacataaggaagagttgtttgatattcttcatgatacacatctcagtattggacatggtgggcggacacgcatgctcaaggagctgcaaggaaaatatgggaatgtcaccaaagaagttattgtcttatatctgactctgtgtaaacagtgccaccagaagaacccagtacccaagagaggccttgcaccaaagcccatgacttttaaggacatagactccacatgccaagttgaaatacttgacatgcagtccagtgccgatggtgagttcaagttcattttatactaccaggatcactcaaccaagtttattattttacggccattaagaaccaaacaggcccatgaggtggtcagtgtcttgttagatattttcacaattcttggtacacccagtgtgttagactctgacagtggcgttgagttcacaaaccaggttgttcatgagctcaatgagttgtggccagacctaaagattgtatctggtaagtaccaccctggccaaagccagggctccctggaaggagcaagccgtgatgtaaagaacatgataagtacctggatgcagagtaaccactcatgtcactgggccaaaggcctccgattcatgcagatggtgaggaatcaggctttcgacgtttccttgcagcaaagtccatttgaggcaatgtttggctataaagccaaatttgggctatattcctcaaacttgccccgggaaactgtggctactttacaaacggaagaagagctagaaattgctgaagaacagctagaaaatagcctttggatcaggcaggaagaaagggctgagattggagcagacagatctgatatggacgatgacatggatcccactcctgaagcttcagaacccagcacctcacaagggacttccggtctcctctgctggtgaacagatggctgctgggtggacagtcacaggtgtctctctgagcatagtcatctgagaactgttgccagaggccccagaggaaaagattgaaggctgcactctcaggtcaagttgtacatggcagtccttgctcaaaaagacaaaagttcaggtctgtgtatttattcttagggctgccataaaaaattaccacaacctggccgggcgcagcgctcatgcccgtaatcccagcactttggtaggccgaggtgggcgggtcacttgagatcaggagttcaagactagcctggccaacatgatgaaaccctgtctctactgaaaatatagaaattggccaggcttggagctgtgtgcctgtaatcccagctaaccaggaggctgaggcaggagaatcacttgaacccgggaggcagaggttgcagtgagccgagaccatgccactgcactccggcctgggtgacaaagcaagactctgtctc

SEQ ID NO: 7090 - DNA, 3671 bp, Homo Sapiens
  NM_213598
aggattggccctggaacagtgtggggcctggaccgctgggtaggcgcgtccagcggcctgagcaggggagggtaatgaggctgttacgcgccttctccgcatcttggcgggagcctgacgccccgcttcttccctaacggggtgttccaccggcgcctgccgaggcctaggcctccgcagccgccctccgtctcctcagccccgacgctgcgcccgctttgtgcgcatttttctctggggaaactgaggctccgagtgcgaaagtcagccgaggtcgccccgcccaggacagagaagggctgggggtcggctgagccgcggcattcccgggccccgctagggctgcagggtctcaggatggcagcctcggcgcaggtgtctgtgacctttgaggatgtggctgtgacattcacccaggaggagtggggacagttggatgcagcccagagaaccttgtatcaggaggtgatgctggagacctgcggacttctcatgtctctgggctgtcctttgttcaaaccagagctgatctaccagttggatcacagacaggagctatggatggctacaaaagacctctcccaaagctcctatccaggtgacaacacaaaacccaagaccacagagcctaccttttctcacctggccttgcctgaggaagtcttactccaggaacaactgacacaaggagcctcaaagaactcccaattagggcaatccaaggatcaggatgggccatctgaaatgcaagaagtccacttgaaaatagggataggcccccagcgggggaagctgctggagaaaatgagttctgaacgtgatggtttggggtcagatgatggtgtatgtacaaagattacacagaaacaagtttcaacagaaggtgatctctatgaatgtgattcacatggaccagttacagatgccttgattcgcgaagagaaaaattcctataaatgtgaggaatgcgggaaagtgtttaaaaagaatgccctccttgttcagcatgaacggattcacactcaagtgaagccctatgaatgcacagagtgtgggaaaacctttagcaagagcactcatcttcttcagcacctcatcatccacactggggagaagccctataagtgcatggagtgtgggaaggcttttaaccgcaggtcacacctcacacggcaccagcggattcacagtggagagaagccttataagtgcagtgaatgtggaaaggccttcacccaccgctccacttttgtcttgcatcacaggagccacactggagaaaaaccctttgtgtgcaaagagtgtggcaaagcctttcgagataggccaggtttcattcgacactacatcatccacacgggagagaagccctatgagtgcattgagtgtgggaaggccttcaaccgccggtcatacctcacgtggcaccaacagattcacactggagtgaaaccctttgaatgcaacgagtgtggaaaagctttttgcgagagtgcagacctcattcaacactacattatccacactggggagaagccctataagtgcatggagtgtgggaaggcgttcaaccgtaggtcacacctcaagcagcatcaacggattcacactggggagaagccttatgaatgcagtgaatgtggaaaggccttcacccactgctccacttttgtcttgcataaaaggacccacacaggagaaaaaccctatgaatgcaaagaatgtggaaaagcctttagtgatagggcagacctcattcgccacttcagcatccacactggagagaaaccctatgagtgcgtggagtgtggaaaggccttcaaccgcagctcacacctcacgaggcaccaacagattcacactggagagaaaccctatgaatgcatccagtgtgggaaagccttttgccggagcgcaaaccttattcgacactccatcattcacactggagagaagccgtatgaatgcagtgagtgtggaaaggcttttaatcgcggctcatccctcacacatcatcaaaggattcatactgggagaaaccctaccattgtaacagatgtgggaagaccttttatgactgcacagacttcagtcaacatccaggaacttttattagggaaagagtttttgaatatcaccactgaagaaaatctgtggtgaaagggaacatcttaccatctggccattcacactgaagagaaacttcataagcatcctctctttgagaaaacgtgtaatagatgatcatttgtcgtctaaacaatcaagttagaaattgaaccagcctggagtcttattctccacctgagaattcacccatgagagagacccagtggttgctatgcacttaggaaaactttcagccacatctttcttcttagtttacagtgaaatattatctcagggatattttttttttttttttgagacggagtctcgctctgtcgcccaggctggagtgcagtggcgggatctcggctcactgcaagctccgcctcccgggttcacgccattctcctgcctcagcctcccaagtagctgggactacaggcacccgccactacgcctggctaattttttgtatttttagtagagacggggtttcaccgttttagccgggatggtctcgatctcctgacctcgtgatccgcccgcctcagcctcccaaagtgctgggattacaggcgtgagccaccgcgcccggccatctcagggatatttaaacaaaggaagaggaaatatagggaagagaaagaaaccacagcttcttttagacttgtctgacaagcctatggcaattttgtcgtccctttgttattttatgtgggagagggaaatgtttcagaaacgaaagatctcatcccctttatttttctgtgtatgcattcactgctgcccagtgtcagaacagttatacaaacgagggcttgaaaacattttgtgaaaacttgcttagtcctgcaacgttctccactctcgaggtgcagaagcatacatctttataaaaaatatggaggcttgagttatgaaacacttttataaggagataaggatgtacatatgtttggacacattgtccacttcagatgcttgtttaaaaaaatgtttcaccatgtgtctttacccaatacacatactttttcttgatgtggatttactttttttttttttttttaagttttcctgggatagggatgatagtgtaattgttcatgcccacagtaatcctgggaatcttagttttttcctatgattgtggtttctcagcttctttacctctcctttgagttaggtccacctcagttttctaaaggtcaaattaaggcccccccaaaaatacagtatgtagctgaattcctttgaaagatcatgataaactcagaagaacaaacatagaaggaatgtcatttttaatctttttaaagagtgtgtgaaaattcactttaactggaattttaacaggcaagccggcatgcatatatgtagggatgtgtgactttcacagttgtcaccatggacttaggcttgattaaaatgctacacatttagagcgttttgtaattccttttttatatttttaagactagattttgagccatgtgatagttttacctcatattaaatatattgtacagaagtaaaaataatcatgtattcactttgaactcctc

SEQ ID NO: 7091 - DNA, 1654 bp, Homo Sapiens
  NM_213603
cgagaggctctgaggctgccagagtggttgtgtctgttcctccggtaaggggtgattcgccgaggggcgcggaccagacagacctcgggtcaggcccgggaaccccgagaggagagcccagcccctggtggaggcggcttggcggagattcggagccgtcagcagctcagccagacgtccaggatcccaccccttgcaaaagaccaggccgtggaagccatgttcccaccagccagggggaaggagctgctctcgtttgaggatgtggcgatgtacttcaccagagaggagtggggccacctcaactggggtcagaaggacctctaccgagatgtgatgttggagaactacaggaacatggtcttgctgggatttcagtttcccaaacctgagatgatctgtcagctggagaactgggacgagcagtggatcctggatctaccgagaactgggaataggaaggcttccggtagtgcttgcccaggttctgaagccagacacaagatgaaaaagctaactccaaaacagaaattttctgaagatttagagtcatataagatatcagtggtaatgcaggaatcagctgagaaactttcagaaaagttacataagtgtaaagaatttgtggacagttgcaggcttactttccctactagtggtgatgaatacagcaggggcttccttcaaaaccttaaccttattcaagatcagaatgcgcaaacaaggtggaagcagggcagatatgatgaggatggcaaacccttcaatcaaagatctttgcttttggggcatgagcgaattctcacaagagcaaagtcttatgaatgcagtgaatgtggaaaagtcattaggcgtaaggcatggtttgatcaacatcaaagaattcactttttagagaatccttttgagtgtaaggtctgtgggcaagccttcagacagcggtcagctcttacggtccataaacagtgtcacctgcaaaacaagccatacagatgtcatgactgtggaaagtgttttcggcagctcgcgtatcttgttgaacataagaggattcacaccaaagaaaaaccttataaatgtagcaaatgtgaaaaaacgtttagtcagaattcaacccttattcgacatcaggtgatccatagtggagaaaaacgccataaatgccttgagtgtggaaaagcctttggccggcattcaacccttctatgtcatcaacagattcacagtaaaccgaacacccataaatgcagtgaatgtggacagtcctttggtaggaatgtggatctcattcagcatcaaagaatccatacaaaggaggaattctttcaatgtggagaatgtgggaaaacgtttagttttaagaggaatctttttcgacatcaggtcattcacactggaagccaaccctaccaatgtgtcatatgtggaaaatctttcaagtggcacacaagctttattaagcaccagggcactcacaaaggacagatatccacatgatgttaattggaaagcagtcattggagaactagaacttataaacctctacttcaagtgtgtatcacgtaattgtttccatgaaaagcaataaatgtaacaaagggttaaaaaaaaaaaaaaaaaaaaaaaaaaaaaaaaaaaaaaaaaaaaaaaaaaa

SEQ ID NO: 7092 - DNA, 2867 bp, Homo Sapiens
  NM_213604
cgctcgcgtccgccgggcagtcccctgccgcagatccgcgcccgccgcgcgagggcgcccggggccgccgcccctcctgacccgggcctgggcgcgcctgcggaggccgcggtgggagggaccgtcccaggctccccaccccgcccagcaccttgggccccgccgcttccgctcgccctggggccgctcagggagccgggacgcgctgcctgggctccgcgcagccgatgacattctgagttcttcctctccataccgggctccacgtctcctgtcttctttacctgatccacaggacccctcaactttcctgtaagggaggctctattaccccgtttttcagagacgagaggtagggctcagagaggtttagttactttccaagatcacacagccagtcagggcagagccgggacacaaccctgtgtctctggcggtggctctatggactcggcccctctgttccccaggccccacctcttccagaacctcctgctcttcctgtgggccctgctgaactgtggtttgggggtcagtgctcagggtccgggcgagtggaccccgtgggtgtcctggacccgctgctccagctcctgcgggcgtggcgtctctgtgcgcagccggcgctgcctccggcttcctggggaagaaccgtgctggggagactcccatgagtaccgcctctgccagttgccagactgccccccaggggctgtgcccttccgagacctacagtgtgccctgtacaatggccgccctgtcctgggcacccagaagacctaccagtgggtgcccttccatggggcgcccaaccagtgcgacctcaactgcctggctgaggggcacgccttctaccacagcttcggccgcgtcctggacggcaccgcctgcagcccgggtgcccagggggtctgcgtggctggccgctgccttagcgccggctgtgatgggttgttgggctcgggtgccctcgaggaccgctgtggccgctgcggaggcgccaacgactcgtgccttttcgtgcagcgcgtgtttcgtgacgccggtgccttcgctgggtactggaacgtgaccctgatccccgagggcgccagacacatccgcgtggaacacaggagccgcaaccacctggcactgatggggggcgatgggcgctacgtgcttaatgggcactgggtggtcagcccaccagggacctacgaggcggccggcacgcatgtggtctacacccgagacacagggccccaggagacattgcaagcagccgggcccacctcccatgacctgctcctacaggtcctcctgcaggagcccaaccctggcatcgagtttgagttctggctccctcgggagcgctacagccccttccaggctcgtgtgcaggccctgggctggcccctgaggcagcctcagccccggggggtggagcctcagccccccgcagcccctgctgtcacccctgcacagaccccaacgctggccccagacccctgcccaccctgccctgacacccgcggccgcgcccaccgactactccactattgcggcagtgactttgtgttccaggcccgagtgctgggccaccaccaccaggcccaggagacccgctatgaggtgcgcatccagctcgtctacaagaaccgctcgccactgcgggcacgcgagtacgtgtgggcgccaggccactgcccctgcccgatgctggcaccccaccgggactacctgatggctgtccagcgtcttgtcagccccgacggcacacaggaccagctgctgctgccccacgccggctacgcccggccctggagccctgcggaggacagccgcatacgcctgactgcccggcgctgtcctggctgagcccctgcaggagccccggccacacacagcaagaaagatacatctgaccagcctcaacgtcaacgtatttcccctctcaccctggcttccaggcagctctgaaatacgtcccacctgtgcagctatgtgactccctcccacacacgcttaagacacctctgcatgcagtcaaagccactgtcacaagccggcaggcactggtgaggaggcactaaggagactctgacttttatttcgcctctctccttggctgccaggaagctcatagctatttatactcagaaagtttaacgctgctttctttctctttgcgcgcgtcacacttgcttggagacactgtcatgaacgagcatgacaccctgctgccctgggtacccagaagatcatctgtttacttcccagacactgtgctgtctctgctctctgctactcacacacaccctcatgtgtgaagggcagagacactgtcacaaacaggcatgccccttagaagacatgcctaaccaggcactgtaacgtaccaacgtaccaatttccccttttcccctggctaccaggaaactcggagacaatcttttcagcctcagcatttctggctggatttccacccatcaacacgtgcttgctcctcctttttttttttttctgaggtagacccttgctctgtcacctaggctgaagtgcggtggtgcaatcatggctcactgcagcctcaaattcctgggctcaagcgatcctcccacctcagcctccacagcagctggaactccaggtgtgaatcaccatgcccggctaacttttaaattttttgtagagatggggtcttgctacgttgcccacactgctctccaactactggcctcaaacgatcctcctgcctcggcctcccaaagcactggaatttcaggcatgcactatcgtactggctgttcaccccccttttattcctctttaatttttacaagcactttttaaaaaaaaattttactttaagttcaaaaaaaaaa

SEQ ID NO: 7093 - DNA, 2335 bp, Homo Sapiens
  NM_213605
ggaaccggagcctgagagccgggcgccgtgcgctcctccccgcgctgtctcggcggcccaggaattcactgtctgtagcatctgctcctccacagagggaccctggaatggcgatggcactcccgatgcctggacctcaggaggcggttgtgttcgaggatgtggctgtgtacttcacaaggatagagtggagttgcctggcccccgaccagcaggcactctacagggacgtgatgctggagaactatgggaacctggcctcactaggctttcttgttgccaaaccagcactgatctccctattggagcaaggagaggagccgggggccttgattctgcaggtggctgaacagagcgtggccaaagccagcctgtgcacagattccaggatggaggctgggatcatggagtctcctctgcagagaaagctctccaggcaggcaggactgccgggcaccgtgtgggggtgcctcccctgggggcaccctgtgggggggcaccctgcaccaccccacccgcatggcggtcctgaggacgggtcagataaacccacccacccccgggctcgggagcacagcgcctccccaagggttctgcaggaagacctgggccggcctgtggggagctcagccccccgctacaggtgcgtgtgcggcaaggcgttcagatacaactcgctgcttctcaggcaccagatcatccacaccggcgccaagcccttccagtgcacagagtgcgggaaggccttcaagcaaagctccatcctgctgcggcaccagctgatccacactgaggagaagccgttccagtgcggcgagtgcgggaaggccttccggcagagcacgcagctggctgcccaccaccgcgtccacacccgcgagcggccctacgcatgcggcgagtgcggcaaggccttcagccgcagctcccggctgctgcagcaccagaagttccacaccggggagaagcccttcgcgtgcacagagtgcggcaaggcgttctgccgcaggttcaccctcaacgagcacggccgcatccacagcggggagcggccctaccggtgcctgcggtgtgggcagcgcttcatccgagggtcctcgctcctgaagcaccaccggctgcacgcgcaggagggtgcccaggacggcggcgtggggcagggcgccctgctcggagctgcgcagaggccccaggcgggggacccgccccacgagtgcccggtgtgcgggaggccgttccgacacaactccctgctgctgctgcacctgcgcctacacacgggcgagaagccgttcgagtgcgcggagtgcggcaaggccttcggtcgcaagtccaacctcactctgcaccagaagatccacaccaaggagaagcccttcgcgtgcaccgagtgcggcaaggcgttccgcaggagctacacgctgaacgagcactaccggctccacagcggcgagaggccataccggtgccgcgcctgcgggagggcctgcagccggctgtccaccctcatccagcaccagaaggtgcacggccgcgagcccggggaggacacagagggcaggcgggcgccctgttgggcttcctgatgacggggacgacaggccgaggattcacgctggaagcccacccaagccggcggggccctagcgcagaaattcagaaccccctgtcctgaaggtgaagcaaagtctaaagaaagggccagctcccatcaggagctcggcttcttgctccagccgggcactggggagggaaagggcaccaggcagcccgtggtgtggcctcaggaaccactatcagccaccatttcctggggccttccggaaatgtccaggagcgggcagaagggagagagggaggggcagctatgctcagtccccaaagagcagggcacagggggcgccacagacgcatatgcagctgagctccccacaggccggcccgggtcttcgtgcagaaccattgggcacagccaggccttagcgccaggctccgtgtggcggtcaattccaggtgctgtaaagccgactaacagggtacagggagccttagctggctgccatgtctcctgcctgtaatcccatcactttgggaggctgaggtgggaggtttgcttaagcccaggagtttgagaccagcttgggcaacatggtgaaacttctctacaaaaaatttaaaaataagtcaggtatcgtggtctgtgcctgtacgctgtagtcccagctactcaggaggctgaggtgggaggatgggttgagcctgggaagtcaaggctgcagtgagctatgatagcaccacggcactccaacctggttgacagagtgacaccctgttt

SEQ ID NO: 7094 - DNA, 2111 bp, Homo Sapiens
  NM_213619
acgtgaccggcgcctctgtcattctactgcggccgccctggcttccttctacctgtgcggccctcaacgtctccttggtgcgggacccgcttcactttcggctcccggagtctccctccactgctcagacctctggacctgacaggagacgcctacttggctctgacgcggcgccccagcccggctgtgtccccggcgccccggaccaccctccctgccggctttgggtgcgttgtggggtcccgaggattcgcgagatttgttgaaagacattcaagattacgaagtttagatgaccaaaatggatatccgaggtgctgtggatgctgctgtccccaccaatattattgctgccaaggctgcagaagttcgtgcaaacaaagtcaactggcaatcctatcttcagggacagatgatttctgctgaagattgtgagtttattcagaggtttgaaatgaaacgaagccctgaagagaagcaagagatgcttcaaactgaaggcagccagtgtgctaaaacatttataaatctgatgactcatatctgcaaagaacagaccgttcagtatatactaactatggtggatgatatgctgcaggaaaatcatcagcgtgttagcattttctttgactatgcaagatgtagcaagaacactgcgtggccctactttctgccaatgttgaatcgccaggatcccttcactgttcatatggcagcaagaattattgccaagttagcagcttggggaaaagaactgatggaaggcagtgacttaaattactatttcaattggataaaaactcagctgagttcacagagttcgcagtatgtgcagtgcgtggccgggtgtttgcagctgatgctccgggtcaatgagtaccgctttgcttgggtggaagcagatggggtaaattgcataatgggagtgttgagtaacaagtgtggctttcagctccagtatcaaatgattttttcaatatggctcctggcattcagtcctcaaatgtgtgaacacctgcggcgctataatatcattccagttctgtctgatatccttcaggagtctgtcaaagagaaagtaacaagaatcattcttgcagcatttcgtaactttttagaaaaatcaactgaaagagaaactcgccaagaatatgccctggctatgattcagtgcaaagttctgaaacagttggagaacttggaacagcagaagtacgatgatgaagatatcagcgaagatatcaaatttcttttggaaaaacttggagagagtgtccaggaccttagttcatttgatgaatacagttcagaacttaaatctggaaggttggaatggagtcctgtgcacaaatctgagaaattttggagagagaatgctgtgaggttaaatgagaagaattatgaactcttgaaaatcttgacaaaacttttggaagtgtcagatgatccccaagtcttagctgttgctgctcacgatgttggagaatatgtgcggcattatccacgaggcaaacgggtcatcgagcagctcggtgggaagcagctggtcatgaaccacatgcatcatgaagaccagcaggtccgctataatgctctgctggccgtgcagaagctcatggtgcacaactgggaataccttggcaagcagctccagtccgagcagccccagaccgctgccgcccgaagctaagcctgcctctggccttcccctccgcctcaatgcagaaccagtagtgggagcactgtgtttagagttaagagtgaacactgtttgattttacttggaatttcctctgttatatagcttttcccaatgctaatttccaaacaacaacaacaaaataacatgtttgcctgttaagttgtataaaagtaggtgattctgtatttaaagaaaatattactgttacatatactgcttgcaatttctgtatttattgttctctggaaataaatatagttattaaaggattctcactccaaacatggcctctctctttacttggactttgaacaaaagtcaactgttgtctcttttcaaaccaaattgggagaattgttgcaaagtagtgaatggcaaataaatgttttaaaatctaaaaaaaaaaaaa

SEQ ID NO: 7095 - DNA, 1005 bp, Homo Sapiens
  NM_213636
agaacactggcggccgatcccaacgaggctccctggagcccgacgcagagcagcgccctggccgggccaagcaggagccggcatcatggattccttcaaagtagtgctggaggggccagcaccttggggcttccggctgcaagggggcaaggacttcaatgtgcccctctccatttcccggctcactcctgggggcaaagcggcgcaggccggagtggccgtgggtgactgggtgctgagcatcgatggcgagaatgcgggtagcctcacacacatcgaagctcagaacaagatccgggcctgcggggagcgcctcagcctgggcctcagcagggcccagccggttcagagcaaaccgcagaaggcctccgcccccgccgcggaccctccgcggtacacctttgcacccagcgtctccctcaacaagacggcccggccctttggggcgcccccgcccgctgacagcgccccgcagcagaatggacagccgctccgaccgctggtcccagatgccagcaagcagcggctgatggagaacacagaggactggcggccgcggccggggacaggccagtcgcgttccttccgcatccttgcccacctcacaggcaccgagttcatgcaagacccggatgaggagcacctgaagaaatcaagggaaaagtatgtcctggagctgcagagcccacgctacacccgcctccgggactggcaccaccagcgctctgcccacgtgctcaacgtgcagtcgtagcccggccctctccagccggctgccctctctgcctccctctttctgttcctcctgcccagggcacccccttagtgcctccagcttctgcctacctcaccccccctttcgtgcccctggcctgagcctcctgctggcctggccctggccgcccacctgggttcatctgacactgccttccctctttgccctgtggtactgctgtctgccaggtctgtgctgccttgggcatggaataaacattctcagccctg

SEQ ID NO: 7096 - DNA, 3073 bp, Homo Sapiens
  NM_213648
atccccgcctcccctcctgcccaggtgactgactaatccgccgccttcaggagacagaattggccaaggtttcttggttggagggcggggggtgggaggtcaagtaggggccacctcggggaggcctgccctccaggtccttcccctaaaacttggcactgccgatactcccagcccgttccttcccaagtcaggaacttgcaggggaccccttggcaattctttttctctcaagagcagacagccttcagtcccagccgctgccagggctggtgtgtctgacccagctgtggtttttccaggcctgaaggccccggagtgcaccagcggcatgtacaaagagaccgtctactccgccttcaatctgctcatgcattacccacccccctcgggagcagggcagcacccccagccgcagcccccgctgcacaaggccaatcagcccccccacggtgtcccccaactctctctctacgaacatttcaacagcccacatcccacccctgcacctgcggacatcagccagaagcaagttcacaggcctctgcagacccctgacctctctggcttctactccctgacctcaggcagcatggggcagctcccccacactgtgagctggttcacccacccatccttgatgctaggttctggtgtacctggtcacccagcagccatcccccacccggccattgtgcccccctcagggaagcaggagctgcagcccttcgaccgcaacctgaagacacaagcagagtccaaggcagagaaggaggccaagaagccaaccatcaagaagcccctcaatgccttcatgctgtacatgaaggagatgagagccaaggtcattgcagagtgcacacttaaggagagcgctgccatcaaccagatcctgggccgcaggtggcacgcgctgtcgcgagaagagcaggccaagtactatgagctggcccgcaaggagaggcagctgcacatgcagctatacccaggctggtcagcgcgggacaactacgggaagaagaagaggcggtcgagggaaaagcaccaagaatccaccacaggaggaaaaagaaatgcattcggtacttacccggagaaggccgctgccccagccccgttccttccgatgacagtgctctaggctgccccgggtccccagctccccaggactcaccctcataccatctgctgccccgcttccccacagaactgcttactagccctgcggagccggcacctacatccccaggtctctccactgctctcagcctcccaaccccagggcccccacaggccccccgcagcaccctgcagagcacacaggtacagcaacaggaatctcagagacaggtggcctagcaggcacaggacacctggccgcctccaggagcctaccccctgaaagtgacagagacccagatctcatggaaactggccaggggtcctgttaacgtcatctcagggtccagaccctgaagatttcagaggctgcaggacttctgcctgaacctggggtcatcgattcaaactgctccaagtggtgggaatcagatctgtcttgatgtgtcatctaattaagggaatcccttgtacctatggctgcctgcatctattctttgtaccatctgtcttgccagccagaagcctctgcctccctagcttttctgctataggtcagagatgggctgaactgagcctagctaccttctctacccatctcccccatcccccactgccacaccctccccattcagacacttcatggaccaagaatgagctggtttgtcaaacaacatgtgagcatggtcacaagcacaaagctcaagatgacagctcttctaaggaaatggagaagctctgtttataaaaacaaaaacaaaaccagctgctactcataagttggaccagaggaagccccttactatgatctcaggagcttgcaagaagcaggaaggggaatggaataggttaagtttaggcctatcaacctaagcaacagaaataatctgacactaccttatcaggcaaattggggaggggagggtgtatctagctctagttcaaattatttggaagtgttccctgagaaacccaccagcctaagaagctctggccccaggcttgtcactagcagctgcagtcaacagttcaaagaagtcatggcccaaatccagtgtgcacccctccccattcacagagcctttttcacaattccatttccagttcatctatggcagtccagccagctcctgggcagcttgagagggcaaacccaaaacctcatgacagccagagcctgtctttcagcattcagtccgcctggccggctccagtttccccatggggctgcgggacagaggaccattacaactagatcaaggagcccagaaaacctccagtagtggacaacaggttttcaccatagcctacgttaacccatttttgagccaagcttcaaccctcagccttgaaaaacaagtctttaatttaatttttgttttttgcctaaatccaaagaaaaagggctgccgggccaggcgcggtggctcacgcctgtaatcccagcactttggcaggccgaggcaggtggatcacctgacgtcagtagtttgagaccagcctggccaacatggtgaaaccctgtatctactaaaaatacaaaaattagccggacgtggtggtgcgcgcatgtaatcccagctactcgggaggctgaggcggaagaatcacttgaacccgggaggcggaggttccagtgagccgagatggcgctattgcactccagtctgggtaacagggagactgcatctcaaaaaaaaaaaaaaaaaaaaaaaagggctgtccatgtattcacacacccctcaaaaaaagcctttagttcctactttagccactggtttctcagaatccaaagatcacatattctagtgtaacactgcaagaagtcttgagaaaaagattattgtagtgttcaaaatatttttgtattgttaatgcatcatcatagaaaaacttttaaacatgagaataaagatactttttactgggtttgtttttcaaagcctgaaaaaaa

SEQ ID NO: 7097 - DNA, 1400 bp, Homo Sapiens
  NM_213650
ctccacgcgcggcctggcggcggcggccactctaaccagcgcaaaatgtccctggaacaggaggaggaaacgcaacctgggcggctcctaggacgcagagacgccgtccccgccttcattgagcccaacgtgcgcttctggatcaccgagcgccaatcctttattcgacgatttcttcaatggacagaattattagatcctacaaatgtgttcatttcagttgaaagtatagaaaactcgaggcaactattgtgcacaaatgaagatgtttccagccctgcctcggcggaccaaaggatacaagaagcttggaagcggagtcttgcaacagtgcatcccgacagcagcaacctgatccccaagctttttcgacctgcagcgttcctgcctttcatggcgcccacggtatttttgtcaatgacgccactgaaagggatcaagtccgtgattttacctcaggttttcctctgtgcctacatggcagcgttcaacagcatcaatggaaacagaagttacacttgtaagccactagaaagatcattactaatggcgggagccgttgcttcttcaactttcttaggagtaatccctcagtttgtccagatgaagtatggcctgactggcccttggattaaaagactcttacctgtgatcttcctcgtgcaagccagtggaatgaatgtctacatgtcccgaagtcttgaatccattaaggggattgcggtcatggacaaggaaggcaatgtcctgggtcattccagaattgctgggacaaaggctgttagagaaacgctagcatccagaatagtgctgtttgggacctcagctctgattcctgaagtcttcacctacttttttaaaaggacccagtatttcaggaaaaacccagggtcattgtggattttgaaactgtcttgtactgtcctggcaatgggactgatggtgccattttcttttagtatatttccacagattggacagatacagtactgtagtcttgaagagaaaattcagtctccaacagaagaaacagaaatcttttatcacagaggggtgtaggcgtgagttttaggtgaatttatgtggttcctgcttgaaaaccttcccctctccaggttcggtttagagaactttgccacaggtcttctggggaccccagaggtgtctgtgctgacaaggcgacttcagattccatactgagatcgttcccaggctggcgtctctggggtttttaaggctggctggagaagacagtgggagggtgccccgtctgacacccctggggttgctgagggaacggttggagtggggatcggcctgcgaaaggatactgtgaaatcactaattaactaataaacctgtctcaagttgaaaaaaaaaaaaaaaaaaaaaaaaaaaaa

SEQ ID NO: 7098 - DNA, 11208 bp, Homo Sapiens
  NM_213655
ccggcccttcgcctctgggcgatgggcgacctgtgaggccggtccccatcgctgggggcgcgtgtgggaggaggcggccgcccgagtgaccgggagccgggccgcggccttccctcgcccgcctcggcccctcccactcctctgccccggggccgccaccgcccgggcgtcggacctggtcccgtgctcgcggtgccgccgccctctgggcctagcccgcccagctcggcgagcggcggcagtgggagccgcgtccgccgcatccgcctcgactcggtgccggcccctggccctcccctcatgactgcggcgcctctgctgccaccgcccgcccggccgccgctcgccgcaggatggatgcggaccgtgcggcgctaacccccgtggctcagctcccgaatcgcccgccttcgagccctcctcgtgagccgcagcagcctcggtgccagcccccgccgcagctgggcccagcggtccgcctgtccctcgttgcggcttgtcggtgctgagtgaggcgtcgtccgggtcggcgcgaacccgcccggccgcggttccctgcagacctctgcgcgggcggctcggcccttcacgcccttttcgttcacgaatccgagcccgctcgcctctctccagcgaaccgaccatgtctggcggcgccgcagagaagcagagcagcactcccggttccctgttcctctcgccgccggctcctgcccccaagaatggctccagctccgattcctccgtgggggagaaactgggagccgcggccgccgacgctgtgaccggcaggaccgaggagtacaggcgccgccgccacactatggacaaggacagccgtggggcggccgcgaccactaccaccactgagcaccgcttcttccgccggagcgtcatctgtgactccaatgccactgcactggagcttcccggccttcctctttccctgccccagcccagcatccccgcggctgtcccgcagagtgctccaccggagccccaccgggaagagaccgtgaccgccaccgccacttcccaggtagcccagcagcctccagccgctgccgcccctggggaacaggccgtcgcgggccctgccccctcgactgtccccagcagtaccagcaaagaccgcccagtgtcccagcctagccttgtggggagcaaagaggagccgccgccggcgagaagtggcagcggcggcggcagcgccaaggagccacaggaggaacggagccagcagcaggatgatatcgaagagctggagaccaaggccgtgggaatgtctaacgatggccgctttctcaagtttgacatcgaaatcggcagaggctcctttaagacggtctacaaaggtctggacactgaaaccaccgtggaagtcgcctggtgtgaactgcaggatcgaaaattaacaaagtctgagaggcagagatttaaagaagaagctgaaatgttaaaaggtcttcagcatcccaatattgttagattttatgattcctgggaatccacagtaaaaggaaagaagtgcattgttttggtgactgaacttatgacgtctggaacacttaaaacgtatctgaaaaggtttaaagtgatgaagatcaaagttctaagaagctggtgccgtcagatccttaaaggtcttcagtttcttcatactcgaactccacctatcattcaccgcgatcttaaatgtgacaacatctttatcaccggccctactggctcagtcaagattggagacctcggtctggcaaccctgaagcgggcttcttttgccaagagtgtgataggtaccccagagttcatggcccctgagatgtatgaggagaaatatgatgaatccgttgacgtttatgcttttgggatgtgcatgcttgagatggctacatctgaatatccttactcggagtgccaaaatgctgcacagatctaccgtcgcgtgaccagtggggtgaagccagccagttttgacaaagtagcaattcctgaagtgaaggaaattattgaaggatgcatacgacaaaacaaagatgaaagatattccatcaaagaccttttgaaccatgccttcttccaagaggaaacaggagtacgggtagaattagcagaagaagatgatggagaaaaaatagccataaaattatggctacgtattgaagatattaagaaattaaagggaaaatacaaagataatgaagctattgagttttcttttgatttagagagagatgtcccagaagatgttgcacaagaaatggtagagtctgggtatgtctgtgaaggtgatcacaagaccatggctaaagctatcaaagacagagtatcattaattaagaggaaacgagagcagcggcagttggtacgggaggagcaagaaaaaaaaaagcaggaagagagcagtctcaaacagcaggtagaacaatccagtgcttcccagacaggaatcaagcagctcccttctgctagcaccggcatacctactgcttctaccacttcagcttcagtttctacacaagtagaacctgaagaacctgaggcagatcaacatcaacaactacagtaccagcaacccagtatatctgtgttatctgatgggacggttgacagtggtcagggatcctctgtcttcacagaatctcgagtgagcagccaacagacagtttcatatggttcccaacatgaacaggcacattctacaggcacagtcccagggcatataccttctactgtccaagcacagtctcagccccatggggtatatccaccctcaagtgtgcctcgtcgtggccgtagcatgtcggtttgtgttcccatctttctgctgttgcctctgtgtcccgcatctctcccagtgctcttccaccccaccgccagtactgtctgcacctctttctccttccctcctccggactgccccgaggaaacttttgccgaaaagctttctaaagcattggagagtgtcctgcctatgcactctgcctctcagcgcaagcaccgacgctccagcctgccttccctctttgtcagtactcctcagtccatggcgcatccgtgtggggggaccccaacatacccagaatcacagatatttttcccaactattcatgaacgtccagtttctttttcaccacctcccacctgcccaccgaaagtagccatttcccagcggcgtaagagcacctccttcctggaagcccaaactcaccacttccaacccctgctgaggactgttggccaaagtcttcttccacctggtggcagcccaactaactggacaccagaggccgtagttatgttgggtactacagccagtagagtaactggagagtcatgtgagatacaggtccatcctatgtttgaaccatctcaagtttacagtgactatagacctggactagtacttccagaagaagctcactattttattcctcaggaagcagtgtatgtagctggggtacattaccaggcccgggtggcagaacagtatgagggcattccatacaactcatcagtactgtcaagtcctatgaaacagatacctgaacagaagccagtacaagggggccctacttcaagttctgtctttgaatttccatctggacaggctttcctggtaggacaccttcagaatctaagattagattctggattgggtccgggatctcccctctctagtatttctgcacctatcagtacagatgctacacgtttgaaatttcaccctgtctttgttcctcattctgcgcctgctgtgttaactcataacaatgagagcagaagcaactgtgtatttgaatttcatgttcacacaccaagctcctcttcaggagaaggaggtggaattttacctcagcgtgtttaccgaaatcggcaggttgcagtggacttgaatcaagaagaactgcctcctcaatcagttggattacatggctacttgcagcctgtgactgaagaaaagcataattaccatgccccagaattgaccgtttctgtggtagagcctatcggacagaactggccaataggaagcccagaatattccagtgattcctcacaaatcacttcttcagaccccagtgattttcagtcacctccccctacagggggagcagctgcaccttttggctctgacgtctcaatgccctttatccatctgcctcagacagtgttacaagaatccccacttttcttctgtttcccccaaggaaccacatctcagcaggtcttaactgcctcattttcttcaggaggatctgcacttcatccacaggcacaggggcagagccagggtcagccatcctcaagtagcttaacaggggtttcatcttcccaacccatacaacatcctcagcagcagcagggaatacagcagacagcccctcctcaacagacagtgcagtattcactttcacagacatcaacctccagtgaggccactactgcacagccagtgagtcagcctcaagctccacaagtcttgcctcaagtatcagctggaaaacagagtactcagggagtctctcaggttgctcctgcagagccagttgcagtagcacagacccaagctacccagccgaccactttggcttcctctgtagacagtgcacattcagatgttgcttcaggtatgagtgatggcaatgagaacgtcccatcttccagtggaaggcatgaaggaagaactacaaaacggcattaccgaaaatctgtaaggagtcgctctcgacatgaaaaaacttcacgcccaaaattaagaattttgaatgtttcaaataaaggagaccgagtagtagaatgtcaattagagactcataataggaaaatggttacattcaaatttgacctagatggtgacaaccccgaggagatagcaacaattatggtgaacaatgactttattctagcaatagagagagagtcgtttgtggatcaagtgcgagaaattattgaaaaagctgatgaaatgctcagtgaggatgtcagtgtggaaccagagggtgatcagggattggagagtctacaaggaaaggatgactatggcttttcaggttctcagaaattggaaggagagttcaaacaaccaattcctgcgtcttccatgccacagcaaataggcattcctaccagttctttaactcaagttgttcattctgcgggaaggcggtttatagtgagtcctgtgccagaaagccgattacgagaatcaaaagttttccccagtgaaataacagatacagttgctgcctctacagctcagagccctggaatgaacttgtctcactctgcatcatcccttagtctacaacaggccttttctgaacttagacgtgcccaaatgacagaaggacccaacacagcacctccaaactttagtcatacaggaccaacatttccagtagtacctcctttcttaagtagcattgctggagtcccaaccacagcagcagccacagcaccagtccctgcaacaagcagccctcctaatgacatttccacatcagtaattcagtctgaggttacagtgcccactgaagaggggattgctggagttgccaccagcacaggtgtggtaacttcaggtggtctccccataccacctgtgtctgaatcaccagtactttccagcgtagtttcaagtatcacaatacctgcagttgtctcaatatctactacatccccgtcacttcaagtccccacatccacatctgagatcgttgtttctagtacagcactgtatccttcagtaacagtttcagcaacttcagcctctgcagggggcagtactgctaccccaggtcctaagcctccagctgtagtatctcagcaggcagcaggcagcactactgtgggagccacattaacatcagtttctaccaccacttcattcccaagcacagcttcacagctgtgcattcagcttagcagcagtacttctactcctactttagctgaaaccgtggtagttagcgcacactcactagataagacatctcatagcagtacaactggattggctttctccctctctgcaccatcttcctcttcctctcctggagcaggagtgtctagttatatttctcagcctggtgggctgcatcctttggtcattccatcagtgatagcttctactcctattcttccccaagcagcaggacctacttctacacctttattaccccaagtacctagtatcccacccttggtacagcctgttgccaatgtgcctgctgtacagcagacactaattcatagtcagcctcaaccagctttgcttcccaaccagccccatactcattgtcctgaagtagattctgatacacaacccaaagctcctggaattgatgacataaagactctagaagaaaagctgcggtctctgttcagtgaacacagctcatctggagctcagcatgcctctgtctcactggagacctcactagtcatagagagcactgtcacaccaggcatcccaactactgctgttgcaccaagcaaactcctgacttctaccacaagtacttgcttaccaccaaccaatttaccactaggaacagttgctttgccagttacaccagtggtcacacctgggcaagtttctaccccagtcagcactactacatcaggagtgaaacctggaactgctccctccaagccacctctaactaaggctccggtgctgccagtgggtactgaacttccagcaggtactctacccagcgagcagctgccaccttttccaggaccttctctaacccagtcccagcaacctctagaggatcttgatgctcaattgagaagaacacttagtccagagatgatcacagtgacttctgcggttggtcctgtgtccatggcggctccaacagcaatcacagaagcaggaacacagcctcagaagggtgtttctcaagtcaaagaaggccctgtcctagcaactagttcaggagctggtgtttttaagatgggacgatttcaggtttctgttgcagcagacggtgcccagaaagagggtaaaaataagtcagaagatgcaaagtctgttcattttgaatccagcacctcagagtcctcagtgctatcaagtagtagtccagagagtaccttggtgaaaccagagccgaatggcataaccatccctggtatctcttcagatgtgccagagagtgcccacaaaactactgcctcagaggcaaagtcagacactgggcagcctaccaaggttggacgttttcaggtgacaactacagcaaacaaagtgggtcgtttctctgtatcaaaaactgaggacaagatcactgacacaaagaaagaaggaccagtggcatctcctccttttatggatttggaacaagctgttcttcctgctgtgataccaaagaaagagaagcctgaactgtcagagccttcacatctaaatgggccgtcttctgacccggaggccgcttttttaagtagggatgtggatgatggttccggtagtccacactcgccccatcagctgagctcaaagagccttcctagccagaatctaagtcaaagccttagtaattcatttaactcctcttacatgagtagcgacaatgagtcagatatcgaagatgaagacttaaagttagagctgcgacgactacgagataaacatctcaaagagattcaggacctgcagagtcgccagaagcatgaaattgaatctttgtataccaaactgggcaaggtgccccctgctgttattattcccccagctgctcccctttcagggagaagacgacgacccactaaaagcaaaggcagcaaatctagtcgaagcagttccttggggaataaaagcccccagctttcaggtaacctgtctggtcagagtgcagcttcagtcttgcacccccagcagaccctccaccctcctggcaacatcccagagtccgggcagaatcagctgttacagccccttaagccatctccctccagtgacaacctctattcagccttcaccagtgatggtgccatttcagtaccaagcctttctgctccaggtcaaggaaccagcagcacaaacactgttggggcaacagtgaacagccaagccgcccaagctcagcctcctgccatgacgtccagcaggaagggcacattcacagatgacttgcacaagttggtagacaattgggcccgagatgccatgaatctctcaggcaggagaggaagcaaagggcacatgaattacgagggccctggaatggcaaggaagttctctgcacctgggcaactgtgcatctccatgacctcgaacctgggtggctctgcccccatctctgcagcatcagctacctctctaggtcacttcaccaagtctatgtgccccccacagcagtatggctttccagctaccccatttggcgctcaatggagtgggacgggtggcccagcaccacagccacttggccagttccaacctgtgggaactgcctccttgcagaatttcaacatcagcaatttgcagaaatccatcagcaaccccccaggctccaacctgcggaccacttagacctagagacattaactgaatagatctgggggcaggagatggaatgctgagggggtgggtgggggtgggaagtagcctatatactaactactagtgctgcatttaactggttatttcttgccagaggggaatgtttttaatactgcattgagccctcagaatggagagtctcccccgctccagttattggaatgggagaggaaggaaagaacagcttttttgtcaaggggcagcttcagaccatgctttcctgtttatctatactcagtaatgaggatgagggctaggaaagtcttgttcataaggaagctggagaactcaatgtaaaatcaaacccatctgtaatttcgagtgggtggagctcttgcttttggtacatgccctgaatccctcactccctcaagaatccgaaccacaggacaaaaaccacctactgggctctctcctaccctgccctcctcccttttttttacccctctcttttttattttttctttgctctttagaacccagtgaaaaataccagggtactggggtgcaactctttcttatgataggtcattagtgctttaagcaaaagatattagcagctttgactgcagcattagcaattaggaaaaaaaaaaaattaagttccctgcggacatgtaactttgccatcagttttgatgtggaaacactgtgatatataaaatgttgttggacaacagtagttttaagagtaaaatatgaaacgtttaaaaagttccaaaaaaagctagctctgtcctttacttattgagacactttaactttttcctttgtatttccattgtattagataaataaatgtgaatgtaaaattgtataaattactgtacttgaatacttctgtttcccagtgttgcttgctggacattttagtgccttggacttctattgcttctgccattagcatcaacttaccagaccccagatcaataaagggcatgtggaaggaaatcgtaggtccatgtgaccccagcagtccagcagtggttatgccaaagggaaattgaaaaagtatttttttaagtcattcaacaactttgtctagagcaggtgtaagatgagtagggtgggaagttaggttggcatcagtggttaaaaacagaaagttctgtttcgggaatagtgaggagggggtgttgtaacaaaattggacaacttaaaagaatggtgtgtgctgggtgaaagacaaagactaaagaatgaggaaacaaacgtgatgcctggccagtgactgtcatataaacctttcttatttgagctaggcttgaacagacgtgacctagaagaaactgaacataaagagaagggggtggggggctagttttcaagttggggaacctgatagtgaaaagtcacagatggagaaaattgctctcagaaaaactgtttggattgctttcctcttgttgcacatgtaccatgcatttctcagcttggggtactacattttgtggaaagttaatctatctatctttccacatctgaattaatcattctaggaaagaatacttattcctactcatttcctttatgatgtccaaatggttgcaggatcataatctattgtgccacctttatttctagaagtacaactaatatgttcacattttcaaataaataatactccccgtaagtaataactgcaaccaatcagtgttattcagtgctatgcctccttgtaatgggtagttattaattattttcagagctttccggaaatactgtcctaactggctatgtttaggatctttgttatctctgaagacaaagaaagaagctaggactcttaattttggggtgcttcttgactcttagttgggaaactgaaaatatttccaaccttttacccacgtcaatggcatattctgggaatcaccaccaccaccaccactaccacagaaagaggctggaggctcctgtaccctgttcattccttaagggccctgcttcccttagtaagtaagtaagttggtctacggccctaaatatgcaaatgagagctgaaggtttttaaaaggtagaaaggaaaagggcaagggcttccacccctgctttaaaatgatttatttattctctgcttgtatttcttgtggagagagtaaggatagaaccaacaaggggctgagtagctgagaaaggggccacccaagagtgaaacatactttataccagaggagcagtggagcctcatgcagcacattatcatttgttatttgggtttaataataattttgacatcttttcactcatacacaaaaaaagtcagaactggtgttatttactgttgatttcatcctcctgtgtatgaaataacaagcctagaggaatgaactagtgctactgaactgtttaaattatttttgtgttaatagtacactttgagtatctttttccacattaaaaactttctgaattataaatgttttccttacattatttaacaatgtacactgttaaaaataaaaataaaaattcaaactttgggggtttctcagcagccgttaattgtacattttgcactaactctgggtgttgcgcttcttgtaagattgcgctttgtgcttcagtttgttacctttgtagacttatttaatgaaaccattcaaataaaccaaacttgcttttgttga

SEQ ID NO: 7099 - DNA, 1563 bp, Homo Sapiens
  NM_213657
gcatgccccagaggtacagatgtatatgtctcccaggaagtctctgtgggtgaaggactgatctcaagttgtggctgacactagttaaagccaagttagagggctgtttcagggtctacattgagactacagttgatatgcctacctcctgagacactagtgtgtgagtctcctcctgggcccctgggcaaatggttttggcagcatgaccaaggcctaaatggggctgaaggcaagcacaggaggatgggtcccttttcaggtctggagatggaatcactgttgctatagcaggcctttttatgagactaacctggcctctccactaaaggatgtgtgactttctggggacagaagagtacagtccctgacatcacacactgcagagatggataaccaaggagtaatctactcagacctgaatctgcccccaaacccaaagaggcagcaacgaaaacctaaaggcaataaaagctccattttagcaactgaacaggaaataacctatgcggaattaaaccttcaaaaagcttctcaggattttcaagggaatgacaaaacctatcactgcaaagatttaccatcagctccagagaagctcattgttgggatcctgggaattatctgtcttatcttaatggcctctgtggtaacgatagttgttattccctcacgtcattgtggccattgtcctgaggagtggattacatattccaacagttgttactacattggtaaggaaagaagaacttgggaagagagtttgctggcctgtacttcgaagaactccagtctgctttctatagataatgaagaagaaatgaaatttctgtccatcatttcaccatcctcatggattggtgtgtttcgtaacagcagtcatcatccatgggtgacaatgaatggtttggctttcaaacatgagataaaagactcagataatgctgaacttaactgtgcagtgctacaagtaaatcgacttaaatcagcccagtgtggatcttcaataatatatcattgtaagcataagctttagaggtaaagcgtttgcatttgcagtgcatcagataaattgtatatttcttaaaatagaaatatattatgattgcataaatcttaaaatgaattatgttatttgctctaataagaaaattctaaatcaattattgaaacaggatacacacaattactaaagtacagacatcctagcatttgtgtcgggctcattttgctcaacatggtatttgtggttttcagcctttctaaaagttgcatgttatgtgagtcagcttataggaagtaccaagaacagtcaaacccatggagacagaaagtagaatagtggttgccaatgtctgagggaggttgaaataggagatgacctctaactgatagaacgttactttgtgtcgtgatgaaaactttctaaatttcagtagtggtgatggttgtaactctgcgaatatactaaacatcattgatttttaatcattttaagtgcatgaaatgtatgctttgtacacgacacttcaataaagctatccagaaaaaaaaaaaaaaaaa

SEQ ID NO: 7100 - DNA, 4819 bp, Homo Sapiens
  NM_213662
cgctgtctctccccctcggctcggagaggcccttcggcctgagggagcctcgccgcccgtccccggcacacgcgcagccccggcctctcggcctctgccggagaaacagttgggacccctgattttagcaggatggcccaatggaatcagctacagcagcttgacacacggtacctggagcagctccatcagctctacagtgacagcttcccaatggagctgcggcagtttctggccccttggattgagagtcaagattgggcatatgcggccagcaaagaatcacatgccactttggtgtttcataatctcctgggagagattgaccagcagtatagccgcttcctgcaagagtcgaatgttctctatcagcacaatctacgaagaatcaagcagtttcttcagagcaggtatcttgagaagccaatggagattgcccggattgtggcccggtgcctgtgggaagaatcacgccttctacagactgcagccactgcggcccagcaagggggccaggccaaccaccccacagcagccgtggtgacggagaagcagcagatgctggagcagcaccttcaggatgtccggaagagagtgcaggatctagaacagaaaatgaaagtggtagagaatctccaggatgactttgatttcaactataaaaccctcaagagtcaaggagacatgcaagatctgaatggaaacaaccagtcagtgaccaggcagaagatgcagcagctggaacagatgctcactgcgctggaccagatgcggagaagcatcgtgagtgagctggcggggcttttgtcagcgatggagtacgtgcagaaaactctcacggacgaggagctggctgactggaagaggcggcaacagattgcctgcattggaggcccgcccaacatctgcctagatcggctagaaaactggataacgtcattagcagaatctcaacttcagacccgtcaacaaattaagaaactggaggagttgcagcaaaaagtttcctacaaaggggaccccattgtacagcaccggccgatgctggaggagagaatcgtggagctgtttagaaacttaatgaaaagtgcctttgtggtggagcggcagccctgcatgcccatgcatcctgaccggcccctcgtcatcaagaccggcgtccagttcactactaaagtcaggttgctggtcaaattccctgagttgaattatcagcttaaaattaaagtgtgcattgacaaagactctggggacgttgcagctctcagaggatcccggaaatttaacattctgggcacaaacacaaaagtgatgaacatggaagaatccaacaacggcagcctctctgcagaattcaaacacttgaccctgagggagcagagatgtgggaatgggggccgagccaattgtgatgcttccctgattgtgactgaggagctgcacctgatcacctttgagaccgaggtgtatcaccaaggcctcaagattgacctagagacccactccttgccagttgtggtgatctccaacatctgtcagatgccaaatgcctgggcgtccatcctgtggtacaacatgctgaccaacaatcccaagaatgtaaacttttttaccaagcccccaattggaacctgggatcaagtggccgaggtcctgagctggcagttctcctccaccaccaagcgaggactgagcatcgagcagctgactacactggcagagaaactcttgggacctggtgtgaattattcagggtgtcagatcacatgggctaaattttgcaaagaaaacatggctggcaagggcttctccttctgggtctggctggacaatatcattgaccttgtgaaaaagtacatcctggccctttggaacgaagggtacatcatgggctttatcagtaaggagcgggagcgggccatcttgagcactaagcctccaggcaccttcctgctaagattcagtgaaagcagcaaagaaggaggcgtcactttcacttgggtggagaaggacatcagcggtaagacccagatccagtccgtggaaccatacacaaagcagcagctgaacaacatgtcatttgctgaaatcatcatgggctataagatcatggatgctaccaatatcctggtgtctccactggtctatctctatcctgacattcccaaggaggaggcattcggaaagtattgtcggccagagagccaggagcatcctgaagctgacccaggtagcgctgccccatacctgaagaccaagtttatctgtgtgacaccattcattgatgcagtttggaaataatggtgaaggtgctgaaccctcagcaggagggcagtttgagtccctcacctttgacatggagttgacctcggagtgcgctacctcccccatgtgaggagctgagaacggaagctgcagaaagatacgactgaggcgcctacctgcattctgccacccctcacacagccaaaccccagatcatctgaaactactaactttgtggttccagattttttttaatctcctacttctgctatctttgagcaatctgggcacttttaaaaatagagaaatgagtgaatgtgggtgatctgcttttatctaaatgcaaataaggatgtgttctctgagacccatgatcaggggatgtggcggggggtggctagagggagaaaaaggaaatgtcttgtgttgttttgttcccctgccctcctttctcagcagctttttgttattgttgttgttgttcttagacaagtgcctcctggtgcctgcggcatccttctgcctgtttctgtaagcaaatgccacaggccacctatagctacatactcctggcattgcactttttaaccttgctgacatccaaatagaagataggactatctaagccctaggtttctttttaaattaagaaataataacaattaaagggcaaaaaacactgtatcagcatagcctttctgtatttaagaaacttaagcagccgggcatggtggctcacgcctgtaatcccagcactttgggaggccgaggcggatcataaggtcaggagatcaagaccatcctggctaacacggtgaaaccccgtctctactaaaagtacaaaaaattagctgggtgtggtggtgggcgcctgtagtcccagctactcgggaggctgaggcaggagaatcgcttgaacctgagaggcggaggttgcagtgagccaaaattgcaccactgcacactgcactccatcctgggcgacagtctgagactctgtctcaaaaaaaaaaaaaaaaaaaagaaacttcagttaacagcctccttggtgctttaagcattcagcttccttcaggctggtaatttatataatccctgaaacgggcttcaggtcaaacccttaagacatctgaagctgcaacctggcctttggtgttgaaataggaaggtttaaggagaatctaagcattttagacttttttttataaatagacttattttcctttgtaatgtattggccttttagtgagtaaggctgggcagagggtgcttacaaccttgactccctttctccctggacttgatctgctgtttcagaggctaggttgtttctgtgggtgccttatcagggctgggatacttctgattctggcttccttcctgccccaccctcccgaccccagtccccctgatcctgctagaggcatgtctccttgcgtgtctaaaggtccctcatcctgtttgttttaggaatcctggtctcaggacctcatggaagaagagggggagagagttacaggttggacatgatgcacactatggggccccagcgacgtgtctggttgagctcagggaatatggttcttagccagtttcttggtgatatccagtggcacttgtaatggcgtcttcattcagttcatgcagggcaaaggcttactgataaacttgagtctgccctcgtatgagggtgtatacctggcctccctctgaggctggtgactcctccctgctggggccccacaggtgaggcagaacagctagagggcctccccgcctgcccgccttggctggctagctcgcctctcctgtgcgtatgggaacacctagcacgtgctggatgggctgcctctgactcagaggcatggccggatttggcaactcaaaaccaccttgcctcagctgatcagagtttctgtggaattctgtttgttaaatcaaattagctggtctctgaattaagggggagacgaccttctctaagatgaacagggttcgccccagtcctcctgcctggagacagttgatgtgtcatgcagagctcttacttctccagcaacactcttcagtacataataagcttaactgataaacagaatatttagaaaggtgagacttgggcttaccattgggtttaaatcatagggacctagggcgagggttcagggcttctctggagcagatattgtcaagttcatggccttaggtagcatgtatctggtcttaactctgattgtagcaaaagttctgagaggagctgagccctgttgtggcccattaaagaacagggtcctcaggccctgcccgcttcctgtccactgccccctccccatccccagcccagccgagggaatcccgtgggttgcttacctacctataaggtggtttataagctgctgtcctggccactgcattcaaattccaatgtgtacttcatagtgtaaaaatttatattattgtgaggttttttgtcttttttttttttttttttttttggtatattgctgtatctactttaacttccagaaataaacgttatataggaaccgtaaaa

SEQ ID NO: 7101 - DNA, 1182 bp, Homo Sapiens
  NM_213674
gcggccgcaccccccggccgggccgtgcttctgcccctacaaggtttgggccgaggtgggggagggtcctggttgccggccccgcccggtccctccccgccttttaggcgcccgcgtggccgggacgtcccagtcccgctccgtcctcctcgcctgccaccggtgcacccagtccgctcacccagcccagtccgtccggtcctcaccgcctgccggccggcccaccccccaccgcagccatggacgccatcaagaagaagatgcagatgctgaagctggacaaggagaacgccatcgaccgcgccgagcaggccgaagccgacaagaagcaagctgaggaccgctgcaagcagctggaggaggagcagcaggccctccagaagaagctgaaggggacagaggatgaggtggaaaagtattctgaatccgtgaaggaggcccaggagaaactggagcaggccgagaagaaggccactgatgctgaggcagatgtggcctccctgaaccgccgcattcagctggttgaggaggagctggaccgggcccaggagcgcctggctacagccctgcagaagctggaggaggccgagaaggcggctgatgagagcgagagaggaatgaaggtcatcgaaaaccgggccatgaaggatgaggagaagatggaactgcaggagatgcagctgaaggaggccaagcacatcgctgaggattcagaccgcaaatatgaagaggtggccaggaagctggtgatcctggaaggagagctggagcgctcggaggagagggctgaggtggccgagagccgagccagacagctggaggaggaacttcgaaccatggaccaggccctcaagtccctgatggcctcagaggaggagtattccaccaaagaagataaatatgaagaggagatcaaactgttggaggagaagctgaaggaggctgagacccgagcagagtttgccgagaggtctgtggcaaagttggagaaaaccatcgatgacctagaagagaccttggccagtgccaaggaggagaacgtcgagattcaccagaccttggaccagaccctgctggaactcaacaacctgtgagggccagccccacccccagccaggctatggttgccaccccaacccaataaaactgatgttactagcctctcaaggccctttaatcctt

SEQ ID NO: 7102 - DNA, 749 bp, Homo Sapiens
  NM_213720
gacaagcgctgcggcatttgtccccgcgacagcaccgctgccgccgtctctaaggtcgcccgggtcccaccgccgccaccatgcctcggggaagccgcagcgcggcctcccggccagccagccgcccagccgcgccctctgcccacccgcccgcgcacccaccgccctcggcagccgccccagcccccgccccttcgggccagccggggctcatggctcagatggcgaccacggccgcaggggtagccgtgggctcggctgtgggacacgtcatgggcagcgccctgaccggagccttcagcggggggagctcggagccctcccagcctgctgtccagcaggcccccacccccgctgccccccagcccctgcagatggggccctgcgcctacgagatcaggcagttcctggactgttccaccactcagagtgacctgtccctgtgtgagggcttcagcgaggccctgaagcagtgcaagtactaccatggtctgagctccctgccctgaagaggtcggtgcagactcgggggccagtcctgcacccacctctacccctcgccgacagccagaccacaacaccagattgtacccagatagctgggattggaagtgaggaggtttctcaccccacagataacccaagacacaaatgtgcaattaaaagtttattttagaccacaaaaaaaaaaaaaaaaaaaaaaaaaaaaaaaaaaaaaaaaaaaaaaaaaaaaaaaaaaaaaaaaaaaa

SEQ ID NO: 7103 - DNA, 72 bp, Homo Sapiens
  NR_000010
ggtgcagatgatgacactgtaaagcgaccaaagtctgaacaaagtgattggtacctcgttgtctgatgcacc

SEQ ID NO: 7104 - DNA, 135 bp, Homo Sapiens
  NR_000011
ccgcagccaattaagccgactgagttcctttcctcatggggacccagtgtgcgatggctgcacacagcagcttccttggtagtgtacgcagcctgttggttgtatgggttgctctaagggaccttggagacaggc

SEQ ID NO: 7105 - DNA, 68 bp, Homo Sapiens
  NR_000016
ttgccaatgatggttaagaatttcttcacctgaataaaccatgtggtcagcattgcatctgaggcaaa

SEQ ID NO: 7106 - DNA, 82 bp, Homo Sapiens
  NR_000021
aggtcagtgatgagcaacattcaccatctttcgtttgagtctcacggccatgagatcaaccccatgcaccgctctgagacct

SEQ ID NO: 7107 - DNA, 92 bp, Homo Sapiens
  NR_000022
tcactatgatgattggttgccagacattcgcagtttccaccagaaatgtttttccttatgttggccagttcttccttggatgtctgagtgag

SEQ ID NO: 7108 - DNA, 2131 bp, Homo Sapiens
  NR_000034
gtgagctcactcccgcctccatgttcccggagtcgcctggaagcgtccgcccaaggtcgcgggccgcttggggagtcagcagcgcgccaggccccttcgggccccacacgcattaggtgccttcttgatgggtacggagtgaacgcgggcggcggcgggaccgaggcagcgcccagtttgtaaccgccgcgccgcccgtgcccgcgcgcgccacaccccagcgcgcttccggccgggccacgtgaccgcgcgtgcacgtgttccggcctctccgcttcgccgctccgaacctcctcctggtcgtcccggcattcgtccacgcggagccggcttgggcggggcccgggaggcggcggccggagaagccgcggagacgcgagcgccgagcgtcgcgagggagcaggcccgggcaggcaagcggcggcctccgccatgaaccccaggggcctgttccaggacttcaaccccagtaagtttctcatctacacctgcctgctgctcttctcggtgctgctgcccctccgcctggacggcatcatccaatggagctactgggccgtctttgcccccatatggctgtggaagcttctagtcgtcgcaggcgcctccgtgggcgcgggcgtttgggcccgcaaccctcgctaccgcaccgagggagaggcctgtgtggagttcaaagccatgctgatcgctgtgggcatccacctgctgctgctcatgttcgaagtcctggtctgcgacagggtggagaggggcacccacttctggctgctggtcttcatgcctctcttcttcgtgtcccccgtgtccgtggctgcctgcgtctggggctttcgacacgataggtcgctggagctggagatcctgtgctcggtcaacatcctgcagttcatcttcatcgccctaaagctggacaggattattcactggccgtggctggtggtgtttgtgcccctgtggatcctcatgtcgttcctttgcctggtcgtcctctattacatcgtctggtccctcctgttcctgcggtccctggatgtggttgccgagcagcggagaacacacgtgaccatggctatcagttggataacgattgtcgtgcctctgctcacttttgaggtcctgctggttcacagattggatggccacaatacattctcctacgtctccatatttgtccccctttggctttccttactaactttaatggccacaacatttaggcgaaaggggggcaatcattggtggtttggcattcgcagagacttctgtcagtttctgcttgaaattttcccatttttaagagaatatgggaacatttcatatgatctccatcacgaagatagtgaagatgctgaagaaacatcagttccagaagctccgaaaattgctccaatatttggaaagaaggccagagtagttataacccagagccctgggaaatacgttcccccccctcccaagttaaatattgatatgccagattaaactcctagagaggacccaggcacacacagactccacttggccttcgcctcttgttcattcatcccaaacctggaaatggaaacaggcttcaaacactcgtctcacgccgtgtttgagatcaccgcctcatcagtatgcatcatagatggaggtggtttcagtatgtgggtgtgtgtgatgtgtacctgggtaagagacttgctttccaggttcgcactttcaggtgtagctgggggcagtaagtcgaattgttttagtaggtcctcaaaaggaataaccacacagctgtttgtttaaatgctactgtacctatcaaaactattgtttaaaaagtatttttatacactgctaatctaaaattgtatttcagattgtgcctgtcataacaatagcaaatgtaaaaagttctctttcccaccacttgtttataaacctcatagttgatatttttagtgttcctactgttaaaatactctctccttgggctttgctgatactggtctttaatattctgataggtgaatttttctaatggaatgaacccatgcatatatagtatttatatgaatattttagcagtgtaatatgttgaattctagttctctgcattaccattattacgttaaagtattttttaaagcttagg

SEQ ID NO: 7109 - DNA, 1235 bp, Homo Sapiens
  NR_001298
gaatacagaatgtgggcaaactcgcttctgtgccggccgccagaaggtttgctgagggcaatcactccctggtgccgggctccttgaggttatgcactgggacatctagagcctattgtttgaggaatgcagtcttgcaagcctgctctggatcaagccacagactgaaacacccccgaagagcaagcacgtttcttggagcaggctaagtgtgagtgtcatatcttcaatgggatgaagcgggtgcagtacctgaacagatacatccataaacgggaggagaacctgcgcttcgacagcaacgtggaggagttccaggcagttacggaactggggcggcctgtcgcagagaactggaacagccagaagggcatcccggaggagaagcgggacaagatggacgactactgcagatacaattacggggttttttgagagcttcacagtgcagccgcgagtccatcctaaggtgactgtgtatcctgcaaagacccagcccctgcatcaccgcaaccccctggtcggctctgtgagtggtttctatccaggcagcattaaagtcaggtggttccagaatggtcaggaagagaaggctgcggtggtctccataggcctgatccagaatggagattggaccttccagaccctggtgatgctggaaacagttcctcggagtggagaggtttacacctgccaagtggagcatccaagcgtgacgagccctctcacagtggaatggagtacacggactgaatctgcacagagcaagatgctgagtggagtcgggggctttgtgctgggcctgctcttccttgggacagggctgttcatctacttcaggaatcagaaaggacactctggacttcagccaacaggactcctgcgctggactcctgagctgaagtgcacatgaccacattcaaggaagaaccttctgccacagctttgcaggatgaaaagctttcccacttggctcttattcttccacaagagctctctcaggaccaggttgttactcgttcagcaactctgcagaaaatgccctcccttgtggcttcctcagctcctgttcttggcctgaaaccccacagccttgatggcagcgcctcgtcttcaacttttgtgcttccttttacctaaattttcctgcctcccctgggtctgtattccccttgtgccacaaacacattgcattattcaatgtttctcaaacatggagttaaaaattatctggt

SEQ ID NO: 7110 - DNA, 332 bp, Homo Sapiens
  NR_001445
ggatgtgagggcgatctggctgcgacatctgtcaccccattgatcgccagggttgattcggctgatctggctggctaggcgggtgtccccttcctccctcaccgctccatgtgcgtccctcccgaagctgcgcgctcggtcgaagaggacgaccatccccgatagaggaggaccggtcttcggtcaagggtatacgagtagctgcgctcccctgctagaacctccaaacaagctctcaaggtccatttgtaggagaacgtagggtagtcaagcttccaagactccagacacatccaaatgaggcgctgcatgtggcagtctgcctttctttt

SEQ ID NO: 7111 - DNA, 88 bp, Homo Sapiens
  NR_001453
tcgctgtgatgagtgattgttaaacattcgtagtttccaccaaaagcttggctaatgatggcaacaccttccttggatgtctgagcga

SEQ ID NO: 7112 - DNA, 87 bp, Homo Sapiens
  NR_001454
tcgctatgatgatggattccaaaaccattcgtagtttccaccagaaagtcttatgttggccagttccttccttggatgtttgagcga

SEQ ID NO: 7113 - DNA, 2105 bp, Homo Sapiens
  NR_001565
gtaagacatgacttgttcctctttgctttccaccatgattgtgaggcctcctcagccacagagaactgtgagttcattaaacctctttcctttataaattacgcagtttcgtgtatgtctttattagcagcacgagaacaaactaatacagtaaattggtaccggtagagttgggctgtaaagatacccaaaaatgtggaagtgactttggaactgggtaacaggcagaggttggaacagtttggagggctcagaagaagacaggaaaatgggggaaagtttggaacttcctagagacttgttgaatggctttgaccaaaatgctgataatgatgtggtcaatgaaatccaggctgaggtggtctcagatggagatgaggaacttgttgggaactgaagtaaaggtgattcttgctatgttttagcaaagagactggcagaattttgcccctgccctagagatttgtgaaactttgaacttgagggagatgattttgggtacctggcagaataaatttctaagcaacaaagcatcaagaggtgacttgggtgctgttaagaccattcagttttaaaaggaaaacagagcataaaaattcagaaaatttgcagcctgacaatgagacaggaaagaaaaccccattctctgaggaaaaattcaagccagcggcagaaatttgcataagtaacaaggagccaagtgttaatcaccaaaacaatggggaaaatgtctccagggcatgtcagaggtcttcatggcaggccctcccatcacaggcctggaggcctaggaggaaaaaatggtttcgtgggctggccccagggcccccctcctctatgtagcttagggacttggtgccctgtgtctaagctgctccacccatggctaaagggggccaaggtatgtacagctcaggctgttgcttcagagggttcaagccccaagctttggcagcttccatgtgctgttgagcctgcagatgcacggaaaacaagaattgaggtttgggaacctccgcctagattacagaggatgtatggaaacgcctggatgcccaggcagaagtttgctgcaggggtggggctcttatggagaacctctgctagggcagtgcagaagggaaatgtgggtttgcagcccccatacagagtccctactaaatgctagtccatggaagcatccaggagggaggctgtaccctgcaaagccacaggtggggagctgcccaaggccatgggagcctacccctggcatcagcatcacctgggtgtgagacatggagtcaaaggagatcattttggagctttcagatttgactgccctgctggattctagacttgcatggggcctttagcccctttgttttggccaatttctcccatttggaatgggtgtatttatccaatgcctgtactctcattgtatccaggaagtaactcacttgtttttgattttacaggctcataggcggaagggacttgccttgtttcagatgagactttggactgtggacttttgagttaatgctgaaatgagttaagactgtgggggactgtcaggaaggcatgattggttttgagatgtgaggacatgaaatttgggaggggccatgggtagaatgatatggtttagctgtgtccccatgcaaatttcatcttgaactgtagctcccacaattcccctgtgtcatgggagggacccagtgggaggtaattgaatcgtgggggcgggtccttcccatgctggtcttgtgataatgaataagtctcacgagatctgatggttttataaagaggagttcctctgcacaagttctctctctttgccttctgccatccatataagatgtgacttgctcctccttgccttctgccatccatataagacgtgacttgctcctccgtgccttctgccatgattgtgaggcctccccagccatgtggaactgtgaatccattaaacctctttcctttataaattacccactctcggatatatctttattagcagtgtgacagcagactaatagagggattaaagataaaaattttggctggatgcaatggctcacgcctgctatcccgctataaaaaagaaaaaaaaa

SEQ ID NO: 7114 - DNA, 992 bp, Homo Sapiens
  NR_001588
cctttttgggcgtggaaagatggcggtaaaagccacaatgcgcaggcgtcatcgctcacttctcccctcccggcttctgctccacctgacgcctgcgcagtaagtaagcctgccagacacgctgtggcggctgcctgaagctagtgagtcgcggcgccgcgcacttgtggttgggtcagtgccgcgcgccgctcggtcgttaccgcgaggcgctggtggccttcaggctggacggcgcgggtcagccctggtttgccggcttctgggtctttgaacagccgcgatgtcgatcttcacccccaccaaccagatccgcctaaccaatgtggccgtggtacggatgaagcgcgccaggaagcgcttcgaaatcgcctgctacagaaacaaggtcgtcggctggcggagcggcttggaaaaagaccttgatgaagttctgcagacccactcagtgtttgtaaatgtttcctaaggtcaggttgccaagaaggaagatctcatcagtgcgtttggaacagatgaccaaactgaaatctattttgactaaaggagaagttcaagtatcagataaagacacacacaactggagcagatgtttagggacattgcaattattgtggcagacaaatgtgtgactcctgaaacaaagagaccatacaccgtgatccttattgagagagccatgaaggacatccactatttggtgaaaaccaacaggagtacaaaacagcaggctttggaagtgataaagcagttaaaagagaaaatgaagatagaacgtgctcacatgaggcttcagttcatccttccagtgaatgaaggcaagaagctgaaagaaaagctcaagccactgatcaaggtcatagaaagtaaagattatggccaacagttagaaatcgtaagagtcaaatattttctttgcttcatgttacctaaatattgtattctctagtaataaatttgtagcaaacattcaaaaaaaaaaaaaaaaaaaa

SEQ ID NO: 7115 - DNA, 660 bp, Homo Sapiens
  NR_001589
ggcatgcttctggctcatctgtgatcaccaggaaactcccagatctgacactgtagtgcatttcactgctgacaagaaggctgctgccaccagcctgtgaagcaaggttaaggtgagaaggctggaggtgagattctgggcagtctcctggttgtctacccatggacctagaggtactttgaaagttttggatatctgggctctgactgtgcaataatgggcaaccccaaagtcaaggcacatggcaagaaggtgctgatctccttcggaaaagctgttatgctcacggatgacctcaaaggcacctttgctacactgagtgacctgcactgtaacaagctgcacgtggaccctgagaacttcctgctcttaggcaacgtgatattgattgttttggcaacccacttcagcgaggattttaccctacagatacaggcttcttggcagtaactaacaaatgctgtggttaatgctgtagcccacaagaccactgagttccctgtccactatgtttgtacctatggtccactatgtttgtacctatgtcccaaaatctcatctcctttagatgggggaggttggggagaagagcagtatcctgcctgctgattcagttcctgcatgataaaaatagaataaagaaatatgctctctaagaaa

SEQ ID NO: 7116 - DNA, 985 bp, Homo Sapiens
  NR_002157
tggactccagactccacacccccatgtacttcttcctctcacacctggccgtcgtcaacatcgcctatgcctgcaacacagtgccccagatgctggtgaacctcctgcatccagccaagcccatctcctttgctggctgcatgacatagacctttctctttttgagttttgcacatactgaatgcctcctgttggtgctgatgtcctacgatcggtacgtggccatctgccaccctctccgatatttcatcatcatgacctggaaagtctgcatcactctggccatcacttcctggacatgtggctccctcctggctatggtccatgtgagcctcatcctaagactgcccttttgtgggcctcgtgaaatcaaccacttcttctgtgaaatcctgtctgtcctcaggctggcctgtgctgatacctggctcaaccaggtggtcatctttgcagcctgcatgttcatcctggtgggaccactctgcctggtgctggtctcctactcacacatcctggcggccatcctgaggatccagtctggggagggccgcagaaaggccttctccacctgctcctcccacctctgcgtagtgggactcttctttggcagcgccatcgtcatgtacatggcccctaagtcccgccatcctgaggagcagcagaaggtcctttttctattttacagttctttcaacccgatgctaaaccccctgatttacaacctgaggaatgtagaggtcaagggtgccctgaggagagcactgtgcaaggaaagtcattcctaagaggtgtgacatttgaactgccagcctcagttgtcacgtggactcttgatgcccaattattgcctcaatccagaaaagtttacttctctttatctgtgctttactgacagaagggcaagtcttctctcgttttttgcagataaaattttagatgtgttgcattcattgggtttctatgagatgtggttttatcagacaat

SEQ ID NO: 7117 - DNA, 368 bp, Homo Sapiens
  NR_002162
gacattgccagagtcttggcgatttggcccgacgcgctccgctttcgctacagcatggtggcctactggagacaggctggactcagctacatccgatactcccagatctgtgcaaaagtagtgagagatgcactgaagacagaattcaaagcaaatgccaaaaagacttctggcaacagcgtaaaaattgtgaaagtaaagaaggaataatctaccctgactaaagcttgaaatgctgcatttccaaggtgaagatgtatgggcacatgttatggcagattgaaaaggatctcatttcatgggaaaaaaaaatcctgtcttgttcataaattgacaatgtcaataaattgaaatatggttcactgtta

SEQ ID NO: 7118 - DNA, 3010 bp, Homo Sapiens
  NR_002164
gcgttgcagagggactgtgtgaggtgaaacctccctgccctgtgaacgggatgcaggtccactcgggcgaaacggaaatactcaggaaggcagtggaggactatttctgcttttgtcatggtaaagccttagggacaacagtgatggtgtctgttccctatgagaagatgctgcgagaccagtcggctgtggtagtgcaggggcttccggaaggcgttgcctttcaacaccctgagaattacgaccttgcaaccctgaaatggattttggagaacaaagcagggatttcattcatcataaatagacccttcctaggaccagagagtcagctgggtggccctgggatggtaacagatgcggagagatccatagtatcaccaagtgaaagctgcggccccatcaatgtgaaaactgaacccatggaagattctggcatttcactgaaagcagaagctgtctcagtcaagaaagaatcagaagatcctaattactatcaatataatatgcaaggaagccacccttcttccacaagcaatgaagtaatagaaatggaattaccaatggaagattccactccgctggtcccttcagaagaaccaaatgaggaccctgaagccgaggtgaaaatcgaaggaaacacaaattcatccagtgttacaaattctgcagcaggtgttgaagatcttaacatcgttcaagtgactgttccagataatgagaaggaaagattatcaagcattgaaaagattaaacagctaagagaacaagttaatgacctctttagccgaaaatttggtgaagcaattggcgtggatttccctgtgaaagttccctacaggaagatcacattcaaccctggctgtgtggtgattgatggcatgccccgggggtggtattcaaggaccccggctatctggaaatcagttccatgaggaggatcttggaggcagctgagtttatcaaattcacagtcatcaggccgcttccagggcttgagctcagtaatgtgggaaaatgcaagatagaccaggagggccgtgtgtttcaagaaaagtgggagagagcatttttcttcgtggaagtacagaatattccaacatgtctcatatgcaaacaaagcatgtctgtgtccaaagaatataacctaagacgccactatcaaaccaatcacagcaagcattatgaccagtatacggaaagaatgcgtgacgagaagcttcacgagctgaaaaaagggctcaggaagtatctcttaggctcgtcagacaccgagtgtcccgagcaaaaacaagtgtttgcaaacccaagtccaacccagaaatcccccgtgcagcctgtagaggacctagctgggaacttatgggagaagttacgtgaaaaaatcaggtcttttgtggcatattctatcgcaatcgatgagatcaccgatataaataataccacccagttggccatattcatccgtggtgtcgatgagaatttcgatgtgtccgaagaacttctggatacggtgcccacgacgggtacaaaatctggaaacgagatcttttcgcgtgttgagaagagcctgaaaaagttctgtatcgactggtcgaaattagtaagcgtggcctccactggcaccccagcgatggtggatgccaataacgggcttgttacaaaactgaagtccagggtggcgacgttctgcaagggtgcggaactgaagtccatctgttgtataattcatccgaaatcactctgtgctcagaagttgaagatggaccacgtcatggacgtggtagtgaagtccgtgaactggatatgctcccggggactgaaccacagcgagttcacaaccttgctctatgagctggacagccagtatggtagcctcctgtactacacggagattaagtggctcagtcgcgggctcgtgctaaagagatttttcgaatccttggaagaaatcgactccttcatgtcatccagagggaaacccctgcctcaactgagctccatagattggatccgagacctggccttcttggttgacatgacgatgcatctgaacactttgaacatctctctccaaggacactcccaaatcgtcacgcagatgtatgacctgatccgggtgttcctagcaaaactgtgcctctgggagactcacttgacgaggaataatctggcccactttcccaccctgaaattggtttccagaaatgaaagcgatggcctgaactacattcccaaaatcgcggaactcaagaccgaattccagaaaaggctgtctgatttcaaactctacgaaagcgaactgactctgttcagctccccgttctccacgaagatcgacagtgtgcacgaggagctccagatggaggttatcgacctgcaatgcaacgcggtcctgaagacgaaatacgacaaggtgggaataccagaattctacaagtacctctggggtagctacccgaaatacaagcaccattgcgcaaagattctttccatgttcgggagcacctacatctgcgaacagctgttctccattatgaaactgagcaaaacaaaatactgctcccagttaaaggattcccagtgggattctgtactccacatcgcaacgcgatggagagaaaactcctggcagggccctatggtgggaaaggctggagtcttctagtcccaagggattgggagatgacaaaatgaatttttttttcttttttgagatggagtcttgctctgtcgcccaggttggagtgcagtggcgtgatctcggcttactgcaacttccagctcctgggttcgaacgattctcctgcctcagcctcccgagcagctgggactacaggcgtgcgccaccatgcccggctaatttttgtattagtagagatgaggtttcaccatgttggccaggctggtctccaactcctgacctcaggtgatccacctgcctcgacctcacaaagtgctgggattacaggcatgaaccactgtgcccagctgacgaaatgagttcttaaac

SEQ ID NO: 7119 - DNA, 2484 bp, Homo Sapiens
  NR_002174
catcgaacaaacaactgagatcctgttgtgcctatcacctgttgaagttgccagtcttaaggaaggaatcaatttctttcgcaataagagcactggcaaagactacgtcttgtacaagaataagagccgactgagggcatgcaagaatatgtgcaagcaccaaggaggcctgttcataaaagatatcgaggatttagccggaagttgttgaaatggatgaaaacaacggacttttgcttttagaactgaatcctcctaacccttgggacttacagcccagatctcctgaagagttggcttttggagaagtacagataacatatctcactcatgcctgcatggacctcaagttaggagacaagagaatggtgtttgacccttggttaatcggtcctgcttttgcccgtggatggtggttgctccatgagcctccatctgattggctggagaggctgtgccaggcagacctcatttacatcagtcatctgcactcagaccacctgagttaccccacactgaaaaagcttgctgggagaagaccagatattcccatttatgttggaaacacagaaaggcctgtattttggaatctgaatcagagcggtgtccagttgactaatatcaatgtcgtgccatttggaatatggcagcaggtggacaaaaatcttcgattcatgatcttgatggacggtgttcatcctgagatggacacttgcattattgtggagtacaaaggtcataaaatactcaatatagtagactgcaccagacccaatgggggaaggctgcctatgaaggttgctctaatgatgagtgattttgctggaggagcatcaggctttccaatgactttcagtggtggaaaatttacggaggaatggaaagcccaattcattaaaacagaaaggaagaagctcctgaactacaaggctcggctggtgaagaacctgcaaccccgaatttattgtccctttgctgggtattttgtggaatctcacccatcagacaagtacatcaaggaaacaaacaccaaaaatgacccaaatgaactcaacaatcttatcaagaaaaactctgatgtgataacatggacccctcgaccgggagccacccttgatctgggaagaatgctgaaggatcgaacagacagcaagggcatcatagagcctccagaggggacaaaaatttacaaggattcctgggattttgaaccttatttggaaatcttgaatgctgctctaggagatgaaatatttcttcactcatcctggataaaagaatacttcacttgggctggatttaaagattacaaccttgtggtcaggatgattgagacagatgaggacttcaatccttttcctggaggatatgactatttggttgactttttagatttatccttcccaaaagaaagaccacaacgagaacatccctatgaggaaatccatagccgggtggatgtcatcagacacgtggtgaagaatggtctactctgggatgagttgtatataggattccaaacacggctccagcgggatcctgacatataccatcacctgttttggaatcattttcaaataaaactccccctcacaccacccaactggaagtcattcctgatgtgctgtgagcagaatgggcctgtgattttgcaagaatgcaaaaccacatgaaaatttcaagaattcactgatctgatgcaaaataaaaatttatcattacatcttgaacccaggaagcttacagcaaagagactatgctttatgacgtcagcaatagataattccacgttgcctttgtgatttgtatatatagcttacatttgtggatcactacatagccagattcaaaaatattttacttgttccatccacagttctctacagaaagaaccaatgaacccaataggaacaaattctctgtggaaaacaaagcatagctgtagtagatacgaatccaatcacagaggaaacaggaagagaaaaacatccaagactacagtgaaaactggaaatggtctgttttcgtgatattcgtatgattaagatgcaaattttttcttaggaaaatgtgattgttaactagcattctgttttacatgttgacatttctaacacacacaccactgatttgaacttcaaaatttattttctgattatatatgctaggtctgattctgaagatacaagaattcaatggtggaatttgtctcctgaaatttctagattcataattagaagtgtttattaccaacttctcacttagattaacatcagtgatgtttgattattctggttaaccgctcacatgcataacaataatgctagaaattcaggaattataattttgtgatttatactgtgtggtaaattattcagttctcactgcaaataaatataatgtatatcaatgtaatgtaggtcagaatgtctatggtgagcaaataaaagattattttaaaatatgaaaaaaaaaaaaaaaaaa

SEQ ID NO: 7120 - DNA, 2332 bp, Homo Sapiens
  NR_002184
gggtggcaagatggtggcgcgcaggacgaagctcgcggcgcgggacccggaggacggtatcccgagcccaccgtgctacgcagctattccaatcaagttctctgaaaagcaacaggcttctcactacctctatgtgagagcacacggcattcaacaaggcaccaagtccacctggcctcagaagaggactctttttgtcttcaatgtgcccccatactgcacagagcaggagagcctgtcctgcctccagtccacctgtggccttgtccagtctgtagagttgaaggagaagctggagctggctgggagtcaaggtcgaagttttttcatccaaagccagttccgggtttccaggtagcctacgtggtgttccagaagccaagtggggtgtcagcggccttggccctgaagggccccctgctggtgtccacagagagccaccctgtgaagagtggcattcacaagtggatcagtgactacgcagactctgtgcccgaccctgaggccctgagggtggaagtggacacgttcatggaggcatatgaccagaagatcgctgaggaagaagctaaggccaaggaggaggagggggtccctgacgaggagggctgggtgaaggtgacccgccggggccggcggcctgtgctcccccggactgaggcagccagcttgcgggtgctggagagggagagacggaagcgcagccaaaaagagctgctcaactacgcctggcagcatcgagagagcaagatggagcatctagcgcagctgcgcaagaagtttgaggaggacaagcagaggatcgagctgctgcgggcccagcgcaaattccgaccctactgagccgtgagagccgcagtggatggctggaggtgcagggccaggaggaacatgaggtgaggcagggcctgcagcggtctctgagaggccgagctctggccaacgggccccaggttgaaggccatcgcgtccaacagccccatcagagtccacacaggccaggagtgaaggaccaggccacccctcgggtcttgtgcttcagcagtcctggagacccaggcgtgccgagaggaggacttgtccttcccacctcttgcctccacacccttgaggaccctggatgaatccgttctgtgcttccttttccctcaatgcaaaagcccttgctggcaacaaaaaagcctcaaaagcagtgagaatacaagaaccttttattttccatccagttgggcagcagggaaaggctaggtgggcccagcctgcccttccttcctccagctggctggatatttattattagccaggagaaagcagccctggaacccagactctgtctccctcttgaggtcacagatgttgaagttggaatctcgctccttcccctgactaccatcctaggctgggcctcaagactagtgaggcctgtccccaccatccctggccttgttgtggggctcaggaactcagagtcccagtgttgagtctgggagcactaggtcttcatagttccaggcccagagctacagctgggctgggagcatgtgtgtgcactgtaagaaggagctgatgatactggccacgtgctggggttcgctcatgtggacacagtgattgcctgggacttccacaaactggaactgctggagaggggagggggtgggtggtgaggtgtggccagaggagcctagggagctccatgggccccggggtcagggccctcccacagcattccagctccctgcaggtcaggagcgcctcccacagtgagtttcccccacactcggctccttggagccccgacagtccatagcaccccaggaggtgtctaaccctagggacttggaggcctcccaggggtctaggccagctgagttgtgaagttgcatggcagggacagggcggggccgaggccagggttgctgtgattgtatcagaagaggtacccgtgagaaaagataatgagatgggggcgtgaacagcctgcagacttgtgtctgccttcaagaagccagacagggccgggcgcagtggctcacgcctgtattcccagcactttgggaggccaaggcaggcgggaggccaaggtgggcggatcacgaggtcaggagatcaagagcatcctggttaagacagtgaaaccccgtctctactaaaaatacaaaaaattagccgggcgtggtggcgggcgcctgtagtcccagctactcgggaggctgaggcaggagaatggcatgaacccgggaggtggaacttggagtgagccgagatcgggccactgccctccagcctgggcaacagagcgacactccatctcaaaaaaaaaaaaaaaaaa

SEQ ID NO: 7121 - DNA, 2760 bp, Homo Sapiens
  NR_002186
ttcatattaaaaaaatagctggtaaatctttctaggtagtaacttatccaaacaatactttgagtatcatattttgtgaatgacttgcttaaactgggaaactgaatattctttttaaatcatataattcctgtattaaatgtgaaacacacagtctccaaagtcacctgattctctgtggaaaatgaaaggcattgaaggaaaccagatacattaatacttagttttggttgaaagtgcaacattactgtacttagaaggggcttggtttatttttagatatttaagctatcattaattttagaccaatggctaataataagagagatttttggttgctcatttatggagagacaaagaacagcatggcataaacaaacatcccagaaataaatgaaaagttttaagtgataaaattgtgttttctatgaaccagtgttgtacatgaaccaacattgtgtttcttagctctgacctgtacagtgaggtacctgtcaggacccctagtcttggcactggaaatgacaaagttctcctattactaaattctcatgccttccttttctgacttagtagattgaaattggtaggtactaatgatttatgtttgataaacttaagttctgctgatatcctgttactggtaattctggtaccaaaatttcaaacggtttgattattagtagcattttgagtacctaggtgcatataatacagttagcagacccttacagagtcaaaagagattttggaatctggtgatactgttgtttattacactagcctattacattttctttctttataataactgtttatgtgagtttcattgaaaatcgtggctctattgctttattcatggtttccacaactctttttgtaacaccttaattttctctcttaggtattttcctgttaaataagatatcaaaagcatcaatcacaagacagagaaaacgtattaggaaaaacttgtattagtatattctaaactgaaatggaaaaactcattattcatattttaataaataaaactcccaaatgatcttgctaaattatcccactatttagaagtagaaaataagagaagagtgctttcaaggaaatttgtcatattctcccttctatctagaagttgacaatgaattgcaataaaactaagaaataactgaatgctgaaaaataccatgaattaatgttatggcttctttatttttgtatatccattcccacaaaattgaatttaagattattaatgaaaattctatattaagtaataatgcttgtattagtaatgggcaaagaagtctttctttgttacattaaccgttagtaaaagatgtactttgacatttctgatgtaaaacctatatgtaaatattgtaatttaaatatgattggacagctgttaagttttggggagggaagcagatgccagcgttctctgctgaaaagacaagatggcgcttgacggaccacagcagatggagctggaggaggaaaaggcaggcagtggactctgccagtattatctgtccaagattgaagaactccagggtcaactgcaatataaattggatgggggaaagccacaaggaacagttctgaactccaggtgcatttgcagctgattttgaatgataagacccaaaacctctggaggcggcaggtgcacgggaatgaactaaatgttaaagtgtgcctattacaggaggagctacagctgctgcaggaataggactcctgtgtcagggaagtagtccaggccatgggtaagaagaaagtgttggtcaaggtgcatctcaaggacaagtttgtcatagatgtggacaaaaatatcagcatcagtgatgtgacacccagttccttggtggttctaagaaatgacagctacactttgcacaagatcctacccaacaaggtggactcattggtgtcactgatgatggtgaagaaagtaccagattcagcttatgaaatgattggtagactggataggcagatcaagaagatcaaagaagtgatcgacctgcctgctaagcatcccgagctcttcaaagcactgggcattgcacagcccaagggaatgctgcttggaagagactgttggcctgggctctggctcatcatagggactgtgtacctttattcatgtctctggctctgaattggtacagaaattcattggggaatttctgtgatggcagagaaaatgctcatctgtcatcttcatggatgaaattgactcttttggctcctcagagctggagggggatgctggagggaacagtgaagtgcagcagatgatgcttcgagggtggctttgaggccaccaagagtatcacggtttatcacggctgctaatacgattgatatcctggactcggcactgctttgcccagggcacattgacagaaaaattgaattcccaacctgcaatgagtaggcctggctggtcactttgaagattcattctcagaaatgaacctgacccaggggatcaacctgagaaaaattgctgagcttatgccaggagcatcaggctgaagtgaagggcatgtgcacagaaaccggcatgtatgccctgagtagcgagtccatgtcactcagaaggactttgaggtagtccaaagtcctatctcatgccaaaggacagtgaggaaaaacatgtccatcaagaaactatggaattgagggcacatcctttgtgtgtatccctacaataaaactcagtgggacaagcaaaaaaaaaaaaaaaaa

SEQ ID NO: 7122 - DNA, 1827 bp, Homo Sapiens
  NR_002197
tggttgaagtagatcgcccaggaaagctcttcatttgtgggcttaatacggaaacaagtgagaaaagtcttgaagtagtatttggcaaatatggacgaatagtggaagtactcttgatgaaacgaacagataaagaggatttgcttttgtcacctttgatagcccaggagacgataaggatgcagccagagacgtgtatggaaagtcactagatggaaaagccattaaggtggaacaaaccaccaaaccatcatttgaaagtagtagacgtggacccctccacctccaagaagtagaggccctccaagaggtcttagaggtggaagaggaggaagtggaggaaccaggagacctccctcacggggaggacacatgtatgatggtggatagtccatgaattttaacatgagttcttccaggggattactcccagtaaaaagaggacccccattaagaagtgcgggtcctcctcctaagagatctgcactttcaggaccagtttgcagcagcagtggaatgggaggaagagctcctgtatcacgtggaagagatagttacggaggtccacctcgaagggaaccgctgccctctcacagagatatttatttgtccccaagagatgatgtgtattctactaaagacagctattccagcaaagattacccaagttctcgtgatacaagagattatacaccaccaccacaagattatacttaccgtgactatggtcattccagttcacgtgatgactatccatcaagaggctatggcgatagagagggatatggtcgtgatcttgactattcagatcatccaaatggaggttcctacagagattcatatgagagttatggtaactcaagtagtgctggacatacacgagggcccctgccagcttacggcggaagcagtcgctatgatgattacagcagctcacgtgatggatatggtggaagtcagacagttactcagcagctgaagtgatctctactcaagtggtcgtgatcgggttggcagataagaaagagggcttcctccttctatggaaagggggcaccctcctccacgtgattcctacagcagttcaagccacagagcaccaaggtggtggccatggaggaagccagtctgatagagggggaggcagaagcagatactagaaacaagcaaaactttggaacaaaatcccagttcaaagaaacaaacaaaaagtggaaactattctgtcataactacccaaggactactaaaaggaaaaattgtgttaccttttttaaattccctgttaagtttccttccataatttttatgttcttgtgaggaaaaaagtaaaacattgtttaattttatttgactttatgacgttgcttttcaacaagcaaatgttaaatgtgttaagacttgttgtactagtgttgtaactttccaagtaaaagtgtccctaaaggccacttcttatcggatttttcccagtaaacgaggcaagcaattcttaagatctccacaagacatctagccatctaaaatatggagagatgaatcgttctgcccatacaaacaagctagctattagagggtggttggggtatgctacttataatatatgatatatatttccaactgaaatctcaatgttctcaatataaaaaacctgaaatcaggtgcctattacggaaagtgctgttcacccagtaaacccaaaaaagcaaatggataatgctggccgttttacctttctgacgtttccttgggtatctgcaagaacctccccttttgcctcccccaaataagatcttttaagtgtgtgttaaacaactacggaatact

SEQ ID NO: 7123 - DNA, 954 bp, Homo Sapiens
  NR_002201
agacgttcttcgccgagagtggtcggggtttcctgcttcaacagtgcttggacggaacccggcgctcgtcctgcaccccggccggccgcccatagccagccctccgtcacctcttcaccatgccctcggactgccccaaggcccccgccgcagctccagcgccgcgtagccaccactgccgctgccgccgcctctccttagtcgccggcatgacgaccgcgtctacctcgcaggtgcgccagaactaccaccaagactcagaggccgccatcaaccgccagatcaacctggagctctacgcctcctccatttacctgtgcgtggcttactactttgacagcgatgatgtggctttgaagaactttgccaaatactttcttcaccaatctcatgaggagagggaacatgctgagaaattgatgaagctgtagaaccaacgaggtggccgaatcttccttcaggatatcaagaaaccagactgtgcggggagaatgcgatgggagagcgggctgaatgcgatggattacatttggaaaaaattgtgcattttgcattacatttggaaaaaaatgtgaatcagtcactactggaactgcacaaactggccactgacaaaaatgacccccatttgtgtgacttcattgagacacattacctgaatgaacaagtgaaggccatcaaagaattgggtgaccacgtgaccaacatgcacgagatgggagcgcccgaatctggcgtggcagaatacctctttgacaagcacaccctgggagacagtgataatgaaagctaagcctcaggctaatttccccatagccatagggtgacttaccttgtcaccaaggcagcgcatgtatgttggggtttcctttaccttttctataagttgttccaagacacccacttaagttctttgatttgtaccattccttcaaataaataaatttggtaccc

SEQ ID NO: 7124 - DNA, 910 bp, Homo Sapiens
  NR_002202
cggagagtcgtcggggtttcctgcttcaacagtgcttggacggaacccggcgctcgtcccgcacccgggccggccgtccatagccagccctccgtcacctcttcaccgcaccctcggactgccccagggcccccgccgccgctccagcgccgcgcagccaccgccgccgccaccgccgcctctgcttagtcgccgccatgacgaccgcgtccgcctcgcaggtgcgccagaactcccaccaggactcagaggccgccataaaccgccagatcaacctggagctctacgcctcctacgtttacctgtccatgtcttactactttgaccgcgatgatgtggctttgaagaactttgccaaatactttcttcaccaatctcatgaggagagggaacatgctgagaaactgatggagctgcagaaccaactaggtggctgaatcttccttcaggatatcaagaaaccagactgtgatgactgggagagcaggctgaatgcgacggagtgtgcattacatttggaaaaaaatgtgaatcagtcactactggaactgcacaaactggccactgacaaaaatgacccccatttgtgtgacttcattgagacacattacctgaatgagcaggtgaaagccatcaaagaattgggtgatcaagtgaccaacttgcgcaagatgggagcacccgaatctggcttggcagaatatctttttgacaagcacatcctgggagacagtgataatgaaagctaagcctcaggctaatttccccatagccgtggggtgacttccctggtcaccaaggcagtgcatgcatgttggggtttcctttaccttttctataagttgtaccaaaacatccacttaaattctttgatttgtaccattccttcaaataaagaaatttggtaccc

SEQ ID NO: 7125 - DNA, 912 bp, Homo Sapiens
  NR_002205
agacgttcttcgccgagagtcgttggggtttcctgcttcaacagtgcttggatggaacccagccctcgtcccctaccccggccagccgcccatagccagccctccgtcacctcttcaccgcgccctgggactgccccaaggcccccgccgcagctccagcgccgcgcagcagccgccgccgccgcctctccttagtcactgccatgacgaccgcgtccacctcgcaggtgcgccagaactaccaccaggactcagaggccgccatcaaccgccagatcaacctggagctctacacctcctacctttacctgtccacgtcttactactttgacctcgatgatgtggctttgaagaactttgccaaatactttcttcaccaatctcatgaggagagggaacatgctgagaaactgttgaagctgcagaaccaacgaggtggccgaatccttcttcaggatatcaagaaaccagactgtgatgactgggagagtgggctgaatgcgatggagtgtgcactacatttggaaaaaaatgtgtatcagtcaccactggaactgcacaaaccggccactgacaaaaatgacccccattggtgtgacttcattgagacacattgcctgaatgagcaggtgaagccatcaaagaatggggtgaccacgtgaccaacttgtgcaagatgggagcacccgaatctggcttggcagaatatctctttgacaagcactccctgggagacagtgataatgaaagctaagcctcaggctaatttccccatagccgtggggtgacttccctggtcaccaaggcagtgcatgcatgttgggttttcctttaccttttctataagttgtatcaaaacatccacttaagttctttgatttgtaccattccttcaaataaagaaatttggta

SEQ ID NO: 7126 - DNA, 3785 bp, Homo Sapiens
  NR_002212
gtctccgcgtggcgcgcgcctctagccgcccttcccctggcggctacggccggagggagcggaggcgagcgggagtcgggctccatggagagcggcggacaactgggcagaggcggagctttcatctcggcaccctggttccagtgacccgcgctagcgtcccgtcccgcccgcgtcggagcggccgccggccccgggactgaccggcctcgccgcacctcccgcaccgactagcgctcccaggcgctcctgcgcccgactcgccctcgcccccactccccggcggggtggcggcggccggagcagcagcagcagcagcaggagcccgcctctatgatgaagttcaagcccaaccagacgcggacctacgaccgcgagggcttcaagaagcgggcggcgtgcctgtgcttccggagcgagcaggaggacgaggtgctgctggtgagtagcagccggtacccagaccagtggattgtcccaggaggaggaatggaacccgaggaggaacctggcggtgctgccgtgagggaagtttatgaggaggctggagtcaaaggaaaactaggcagacttctgggcatatttgagcagaaccaagaccgaaagcacagaacatatgtttatgttctaacagtcactgaaatattagaagattgggaagattctgttaatattggaaggaagagagagtggttcaaagtagaagatgctatcaaagttctccagtgtcataaacctgtacatgcagagtatctggaaaagctaaagctgggttgttccccagccaatggaaattctacagtcccttcccttcggataataatgccttgtttgtaaccgctgcacagacctctgggttgccatctagtgtaagatagagagaactgggtaggcctctcccaccatgtgcagtctcatggggagaggcttctttcgtttcctcgtcaaacatctgattgacgcttgcaaactgtctgaatttgccatgcaaggttttcaaacaatttgcatgtttttcagatgctttcaaatctttttttaaaaaaatagtgtaaaatattttaataagccaaagccatgtggaatttttgtttagatgccttaactgtgccacaccccacaaccccctatattattttggttgtctatttctcacagcatattttcagttttttgtccatttgacatcagtctgtggtttattttgtcatcagattacttgtgggtatacctaccccaaaattgttttctcattcacagcattagcatattcagcaaatccatctgtggtgggaattaaaaatattattggtattaaagaaatccattcaccccaaaacttgttttacaggattacaattttaattcaaaatttccagatttgggctatttctgtatgatccaataacttattttgtcacagggcttaatttgccatttttggggatttgtcgactcattttgtctgaattttcacaactggtattatgtcactagctacctgatatggctatttcccttataactcaatagtaccttaacacaaagtataactctgtagagttggtgaatattttagggaaatattagcaaaatgcatgtagtaaagacatcttatgaaaactctattcatggaatttgatttagcatgctcagttgccagttcccattatcgatactctttctatgcagaataccttagaaccgttatttccctcagtgtagattgctcttaaaatgtattcagttatttagtggcccccacaggagtggagtcttgaaatctaattctaaatgccagtcagtgatgatcgcatcacagttgagtgaaatggccttcctgttcagctgttagagactgaagattgttagggcaccttagaatgtctcatcttttctaggttgtcaacaggtactatttgtcacataactaactttcgaggcactggaacatacctgaactaagaattaaatcttttactttatactcacttaaaatcaagaatcccatctaaaacacataggtaccttatctgaaactcttgcacttccccaaccagggcagaaatgaggtgggagaagtttgactaaaatgagggatgggggaaagtaaaagatgtctttttttttttttgagactcgctttgtcacccaggctggagtgcaatggcacaatctcaactcaccgcaacctccgcctcccgggttcaagcgattctcctgcctcagcctcccgagtagttgggattacaggagcctgcctccatgcctggctaattttgtatttttagtagaggcagggtttcttcatgttggtcaggctggtctcaaactcctaacctcgtgatcctcctgcctcgacctcccaaagtgctgggattacaggcatgagccaccatgcccagccaaagatcatttttttatatagacttcagccctttgtaaatattgtaactggggagtatagagtagaaaaaaagtatagttaaaacatttgttctacaaattaacctttaaaaatataattactgctaaaaatagagtgctgttacacttaaggaaaattagtgccattttggaaatgagatcttgtgccataaatacagctgaactgaatataaatgttcacaaattaatgctgtcaaaggaatgagtaaagcagaagaacttttaaccagcaacatttcaagtacgtagtgtgatcaaacatgatcatccagaatttgtatatttttttctttgtacagaggttacatattctgggtgttcttttataaaggaaacattttaaatcccacaaattgacactttctatcttcaatggactaagatttttttggtcagtaatctctgaaatttccttaaattatatacttaacatagcagagaaactggattgtttttgtatataagactgcttccacctgaaatgctgtcataagtactgggggggtgggggagtgcccatcttgtacatgatattcttagaggtaataaggtaatgatgcatgaatttattttataaactcttggactatgtatttgacatgtaaaatatgtacagtattaacgtcaaccatctctttaaagttagcctataaatattgttgtataattttctttggtcagaaacacttggactgaatagtgacactcggtaaggattttcagtgccatttagcaaaacgtctttagtctatgcaactagcaaaaatctgcataatgcaacaacacagttttcacacttcaaattttacatgaggggttcttcacgattctcctggaacccagtctagcaaaatgagaggaaaggccctagggagatttatttctgttaaatagttaactctgctgagtatgacaaatagtgtctactatctcaaccctccaaaatttgcagagtgttgggactgtcatttgtgatttttttttttttttttttttggtggggtagttgaataaaattgggcagctaaatttttcagttccatgtgcctcccaaataaaaaacagaaaataagtagtttttgtgaattgacttgcagacaaagtagaaactgtgctgcatgatgttattttgtaaacagatgacattttctgaccaggcacatgccatccaattttctgtcaatcacactgttgtataaagcagcagaactgaaggggaaaaatgattgttgtatacactgaattgctttgcatggtctcatttgagataattgatgtaagaatcctgacttttttatatttggaaacatcaaataaaaatggaaaaaatgaaaaaa

SEQ ID NO: 7127 - DNA, 1738 bp, Homo Sapiens
  NR_002217
gtctgcagactcgtgaatgacgtctaccgcgtgtataatcgacaccagtatccatttgttgttcttaacatttctgttgattcaggtaacttaataaaaatgcatgcagcggatttggaaaagcccatggtagaaaagcaggatcaatccccttcattaaggactggagaagaaaaaagggacgtgtccatttccagactgcgagaggccttttctcttcgtcacacaacagagaacaagcctcacagcccaaagactccagaaccaagaaggagccctctaggacagaaaaggggtatgtcgtcttctagcacttcagatgccatctctgacaaaggcgtcctgagacctcagaaagaggcagtgagttccagtcagggacccagtgaccctacggacagagcggaggtggagaaggactcggggcatggcagcacttccgtggattctgaggggttcagcatcccagacacgggcagtcactgcagcagcgagtgtgtggccagcaccccaggggacaggggctcgcaggaacatgtggactctcaggagaaagcgcctgaaactgacgactctttttcagatgtggactgccattcaaaccaggaagataccggatgtaaatttcaggttttgcctcagccaactaatctcacatccccaaacacaaaagtgttttaagaaagaagaaattctttccaattctgacattcgtcaaaagttagtaaatactcagaacgtgtcagcttctcaggttgatgtagctgtgaaaattaataagaaagttgtgcccctgaacttttctgagttctttagctaaacgaataaagcagttacatcatgaagcacagcaaagtgaaggggaacagaattacaggaagtttagggcaaggatttgtcctggagaaaatcaagcagccgaagatgaactaagaaaagagataagtaaaacgatgtttgcagaaatggaaatcattggtcagtttaacctgggatttataataaccaaactgaatgaggatatcttcatagtggaccagcatgccacggacgagaagtataacttcgagatgctgcagcagcacaccgtgctccaggggcagaggctcatagcacctcagactctcaacttaactgctgttaatgaagctgttctgatagaaaatctggaaatatttagaaagaatggcttcgattttgttatcgatgaaaatgctccagtcactgaaagggctaaactgatttccttgccaactagtaaaagctggaccttcggaccccaggacgtcgatgaactgatcttcatgctgagcgacagccctggggtcatgtgccggccttcccgagtcaagcagatgtttgcctccagagcctgccggaagtcggtgatgattgggactgctcttaacacaagcgagatgaagaaactgatcacccacatgggggagatggaccacccctggaactgtccccatggaaggccaaccatgagacacatcgccaacctgggtgtcatttctcagaactgaccgtagtcactgtatggaataattggttttatcgcagatttttatgttttgaaagacagagtcttcactaaccttttttgttttaaaatgaaacctgctacttaaaaaaaatacacatcacacccatttaaaagtgatcttgagaaccttttcaaaccagatggagcattgcttgcaaattttttttctctatgtttgcatgcgctcgt

SEQ ID NO: 7128 - DNA, 2099 bp, Homo Sapiens
  NR_002305
aaactaaatcaaacttgagtatgaaacttctttttttttaagtgcctaagtcctgaatgacaacaaaagactgaagaactgacaacgattagaggacactaaggagacttaacaactaaatgcaaaatgggaccctgaatctgatcctggaacacaaaaactaaattagtagaaaagtggtaaaataggtggtcgcgcgcccgaccgccgcagtcccagtcgagccgcgacccttccggctgcccccaccccacctcgccgccatgtgcctccgccgcccagcgctgttcccgggcgtggcgctgcttctcgccgcggcccgcctcgcggctgcctccgacgtgctaggactcagggacgacaacttggagagtcgcatctccgacacgggctctgcgggcctcatgctcgtcgagttcttcgccccctggtgtggacactgcaagagacttgctcctgagtatgaagctgcagctaccagattaaaaggaatagtcccattagcaaaggctgattgcactgccaacactaacacctgtaataaatatggagtcagtggatatccaaccctgaatatgtttagagatggtgaagaagcaggtgcttatgatggacctaggactgctgatggaattgtcagccacctgaagaagcaggcaggcccagcttcagtgcctctcaggactgaggaagaatttaagaaattcattagtgataaagatgcctctatagtaggttttttcgatgattcattcagtgaagctcactccgagttcctaaaagcagccagcaacttgagggataactaccgatttgcacatacgaatgttgagtctctggtgaacgagtatgatgataacggagatggtatcatcttatttcgtccttcacatctcactaacaagttggaggacaagactgtggcatatacagtgcaaaaaatgaccagtggcaaaattaaaaagtttatccaggaaaacatttttggtatctgccctcacatgacagaagacaataaagatttgatacagggcaaggacttacttattgcttactatgatgtggactatgaaaagaatgctaaaggttccaactactggagaaacagggtaatgatggtggcaaagaaattcctggatgctgggcacaaactcaactttgctgtagctagccgcaaaacctttagccatgaactttctgattttggcttggagagcactgctggagagattcctgttgttgctatcagaactgctaaaggagagaagtttgtcatgcaggaggatttctcgcgtgatgggaatgctctggagaggttcctgcaggattactttgatggcaatctgaagagatacctgaagtctgaacctatcccagagagcaatgatgggcctgtgaaggtagtggtagcagagaattttgatgaaatagtgaataatgaaaataaagatgtgctgattgaattttatgccccttggtgtggtcactgtaagaacctggagcccaagtataaagaacttggcgagaagctcagcaaagacctgaatatcgtcatagccaagatggatgccacagccaatgatgtgccttctccatatgaagtcagagttttcctaccatatacttctctccagccaacaagaagctaaatccaaagaaatatgaaggtggccatgaattaagtgattttattagctatctacaacgagaagctacaaacccccctgtaattcaagaagaaaaacccaagaagaagaaggcacaggaggatctctaaagcagtaggcaaacaccactttgtaaaaggactcttccaccagagatgggaaaaccactggggaggactaggacccatatgggaattattacgtctcagggccgagaggacagaatggatataatctgaatcctgttaaattttctctaagccatttcttagctgcactgttatggaaataccaggaccagtttatgtttgtggttttgggaaaaattatttgtgttgggggaaatgttgtgggagtcgggttgagttgggggtattttctaatttttttgtgcatttggaacagtgacaataaataagacccctttaaact

SEQ ID NO: 7129 - DNA, 2162 bp, Homo Sapiens
  NR_002307
gtcgccgctgcgggttgctagcggagtcgcgcgtcgggagctacgtagggcagggaaggcatggcttctgttttcgtccaatgagaaggggccagcggtggcggtcgggccaggtccggggcctggggacgccgaggcggccgcggaggagcgccgcgtcaaggtctccagcctgccctacagtgtggatgcgctcgtgtcggacaagaagccgcccaaggaggcatccccagtgccggccaaaagcgcctcttccggggccaccctgcggctactgctgctgccggggcacggcgctcgggaagcgcacagccccgggccgctgatcaagcccttcgagaccgcctcggtcaagtgggaaaactccctaagacggagcggcgtggatgcaggaaccctgctgataattcgccgccgccaagacacgtgagccctaccacctgcaccctgagaaaacacaagaccaatccgaagccgcgcacagcctttaccacgtcccagctcctcgctctggagggcaagttgctccagaaacagtacctctccattgcagagggtgcggacttctccagctctccgaacctcacggagactcaggtcaaaatcttgttccagaaccgaagggccaagacgaaaagactgcaggagtcagaactggaaaagctgaaaatggctgcaaaacctatgctaccctccagcttcagtctccctttccccatcagctcgcccctgcaggcagcgtccatatacgcagcatcctacccgttccatagacctgtgcttcccatcccgcccgtgggactctatgccacgccagtgggatatggcatgtaccacctgtcctaaggaagaccagatcaatagactccatgatggatgtttgtttcaaagggtttcctctccctctccaagaaggcaggaccagccaatactcctgttctgcaaaccctgagtgcaccaccctaagcggctaggccggcagggccacacgacacagctgaagtttgttctttaggcggaggcaccaagccttgttttcttggtgtaatcttccaggtgcccccttctcctttcacaaagattggctctgatggtttttatgtataaatatatatataataaaatataatacatttgtatacagtagatgtaaaaattcaaattattttaaaaggcaaaatttatatacatatgtgcttttttcctatatgtcaccttcttaaagagactgtgtaagtccatttgttgtgttttcttaaagagggagacaaattatttgcaaaacttgctaaagtcaatgattttgatgggatgattgacttctgcttatggaaaacaaatattagaattggacataatgcacatagaaagtattagatatggagaggtttttcaaagtgaaggggacacatcacatttctgcattttacttgcattaaaagaaacctttttatatactaccatatttgttcctatctctccccacgcccaccccccccccacacacacatttttacagttttacctttttgaagaattttttttttgtaagaccaataaccgggatgagaagaatcctgagaatgcctggaggtgaggtagaaaattagaaatacttcctaattcttctcaaggctgttgctttacttcatttcagataattggagagtaaaaagttaaagcctgttgggaggagttgatggtttctgagaaatactaggtactttcatcctcacagattgcaaagattatttgggtgggggggtacagtaattttctgcttaaaaaatgagtaccttgtaaccattacctgtatgctaaatattcttgaacaattggtagatccagaaagaaaaaaaattatgctttctctgtgtgtgtacctgctgtatatgctaaacttattagaaaattttatatactttttaacatgtccagggcagaagataaagccatgttttgacttggtgaaaatggagttgccaaacagcccattaagctccctggtatttcaccttcctctccatctctcccatccctccagtatgcctttacccctttgaaagggtgccttgtacaattgtatatattttattgaagagttattatatcttattctgaattaaattaaacatgttttattgcaaaaaaaagaagagaaa

SEQ ID NO: 7130 - DNA, 797 bp, Homo Sapiens
  NR_002308
ggtcaaaatggctggcaagcaggccatttcagcatcaggcaagtggctggatggtattcgaaaatggtattacaatactgcaggattcaataaactggggttaatgagagatgatacaatatatgaggatgaagacataaaagaagccataagaaggcttcctgagaacctttataatgacaggatgtgtcacattaagagtgcattggacctgaccatgaagcatcagatcttgcctaaagagcagtggaccaaatatgaagaggaaaatttctaccttgaactgtatgtgcaagaggttattcgggaaagaaaagaaagagaagaatgggcaaagaagtaatcatgtagttgaagtctgtggatgcagctgttatgaagatggttaaacttgaaacaaacaattttaagaattatttggtctgcagatgttttactttaaataaatgtctattgtaatggctggagttattccaaaccttatactgaataactactgaatccatttactgttaaatttttttccaaattttcaagatgtttttagtagtgtttaactacttcctggagctcagaggccactttatcagttttcctcactggttggatagcccatcagtttatgtaaggatgtaacttccatgagttatagccttatggaagctactaaataaaaaagggggtatgcaccccctagtttgccaggattgaaaaacagcctcttcactgctatccaaatagatttgattttgcatcctatcatttaaaaagaaattctgtatgcactccaacatagg

SEQ ID NO: 7131 - DNA, 1649 bp, Homo Sapiens
  NR_002318
ggcggggccgaggcggcgagtgtctgggcgagcgtggctgggcccggtcctgggctgggggcaggggctagggccgggtcccggggtgagccgaaacctgggggtcgggcggggcgggaaatggggcgcagtgaggctgggagccggccctgagctcgtcctgcgtaggggtagccgggctcagggggcgcctgagctggaggtggaagcgtgaagtcaggactgagtgggcgaagagaacctgggctgagcagacatggccgcttaccaacaagaagggcagatgcagcttccccgagctgatgccattcgttcacgtctcatcgatactttctctctcatcgagcatttgcaaggcttgagccaagctgtgctgcgacacactatcaggagttacttgatccttcccgccagaagaaacttatgttgggagatcaacaccagctagtgggcgtctctataaagcctcaacgtatagaacagatttcacatgcccagaggctgttgagcaggcttcatgtgcgctgcagtcagaggccacctctttctttgtgggccggatgggtccttgagtaattgctggaatccacaaataccaaactatggccattgaagctgaccttggagggggcagcttggtttatcttgcttattttcatcctggagatccttcttaagtggctatccaacttttctgttttctggaagagtgcctggaatgtctttgactttgttgttaccatgttggtaaggatagagatcctgagggttcgtttagtgggatgaagaatgtgcctaggtgaatcgaaagaacaagttaacatgataataggaagaaacaaaaatttacttaacttctttcttttgatttttttttcctaaaactaaacatcaatcattgcaggagttgttggtattaggagcaaagtagactaactacaacatcaatgccaacaagagcatctgccggttactgagcacttactaagtgccaagcactattttaagtgttttccttacattatctcatttatgctccacaacaacctaattaaataaccatgaattttatccccctttttatatctgaacaagttgaagtatagtgtttaagcaacttaatatagaaaggctgaatagtaagcacttctcagagaatgctattcaaaggataacgcccagggaacaatgaagaggataagatgaagaagctgcaattctgcctgggtgccttggggtgtattttacttataacctgtgtgttttccacagtccctgcttcccgaggttgtggtattggtaggggtaacaggccaatcggtgtggcttcagcttctgaggatctgccgggtgctgaggtctctcaaactccttgcacaattccgtcaaattcgagttattattttggtcctggtcagggccctcaaggtgatttgactgttgcaagctaaagcagggggcaaggtagataaatgtgagggcttaacatagaatatgaaacaaattggccgggtgcggtggctcatgcctgtaatcccagcactttgggaggccgagggggatgggtcatgaggtcaggagttcgagaccagcctgaccaacatggtgaaaccctgtctctactaaaaataccaaaaaaaaaaaaaaaa

SEQ ID NO: 7132 - DNA, 154 bp, Homo Sapiens
  NR_002324
tgtgcacattgttagagcttggagttgaggctactgactggccgatgaactcgcaagtgtaggtagtgtgctacatgaggggcaagttttcgctaacaccacaagggtctctggcccaatgagtggagtttgatagtaattcttgctacaagta

SEQ ID NO: 7133 - DNA, 76 bp, Homo Sapiens
  NR_002435
gctgtacatgatgacaactggctccctctactgaactgccatgaggaaactgccatgtcacccttctgactacagc

SEQ ID NO: 7134 - DNA, 133 bp, Homo Sapiens
  NR_002436
aagccagccaatgaatctgcttacctgattgtgtttgtgcagacatactttaaaaactggcaatagtaaagccatgttacgagccttaaggacattgaagtcgttaaggtccctgagaatggctataacaaat

SEQ ID NO: 7135 - DNA, 72 bp, Homo Sapiens
  NR_002448
ttgcaatgatgtgaatctctcactgaattcaaccttgaagtgcgaatccatgagctttttaaccctgagcaa

SEQ ID NO: 7136 - DNA, 72 bp, Homo Sapiens
  NR_002450
cgcgtgatgacattctccggaatcgctgtacggccttgatgaaagcacatttgaacccttttccatctgatt

SEQ ID NO: 7137 - DNA, 3874 bp, Homo Sapiens
  NR_002473
tttaaaatattcttcatccagagatagaggtggttcttcctcttacggactgcaaccttcaaattcagctgtggtgtctcggcaaaggcacgatgataccagagtccacgctgacatacagaatgacgaaaagggtggctacagtgtcaatggaggatctggggaaaatacttatggtcggaagtcgttggggcaagagctgagggttaacaatgtgaccagccctgagttcaccagtgttcagcatggcagtcgtgctttagccaccaaagacatgaggaaatcacaggagagatcgatgtcttattgtgatgagtctcgactgtcaaatcttcttcggaggatcacccgggaagacgacagagactgaagattggtcactgtaaagcagttgaaagaatttattcagcaaccagaaaataagctggtactagttaaacaattggataatatcttggctgctgcacatgatgtgcttaatgaaagtagcaaattgcttcaggagttgagacaggagggagcttgctgtcttggccttctttgtgcttctctgagctatgaggctgagaagatcttcaagtggatttttagcaaatttagctcatctgcaaaagatgaagttaaactcctctacttatgtgccacctacaaagcactagagactgtaggagaaaagaaagccttttcatctgtaatgcagcttgtaatgaccagcctgcagtcaattcttgaaaatgtggatacaccagaattgctttgcaaatgtgttaagtgcattcttttggtggctcgatgttaccctcatattttcagcgctaattttagggatacagttgatatattagttggatggcatagagatcatactcagaaaccttcgctcacgcagcaggtatctgggtggttgcagagtttggagccattttgggtagctgatcttgcatttcctacgactcttcttggtcagtttctagaagacatggaagcatatgctgaggacctcagccatgtggcctctggggaatcagtggatgaagacgtccctcctccatcagtgtcatcaccaaagctggctgcgcttctccgggtatttagtactgtgctgaggagcattggggaacgcttcagcccaattcgggtcctccaattactgaggcatacgtaacagttgttctgtacagagtaatgagatgtgtgacggctgcaaaccaggtgtttttttctgaggctgtgttgacagctgctaatgagtgtgttggtgttttgctcggcagcttggatcctagcatgactatacattgtgacatggtcattacatatggattagaccaactggagaattgccagacttgtggtaccaattatatcatctcagtcttgaatttactcacgctgattgttgaacagataaatacgaaactgccatcatcatttgtagaaaaactgtttataccatcatctaaactactattcttgcgttatcataaagaaaaagaggttgttgctgtagcccatgctgtttatcaagcaatgctcagcttgaagaatattcctgttttggagactgcctataagttaatattgggagaaatgacttgtgccctaaacaacctcctgcacagtctgcaacttcctgaggcctgttctgaaataaaacatgaggcttttaagaatcatgtgttcaatgtagacaatgcaaaatttgtagttaaatttgacctcagtgccctgactacaactggaaatgccaaaaactcgagtctttaattgtaatgactttgttttatccacagttaagccttttctcattacatatttatgtatttcactgtcatgtcaacatgtctgcagaatcactgtatgtaacaaacagccatatttaagacatgtgggcgctatctccaactgtctttgcacttctgagtaagaatctgatgattgtgcacagtgacctggctgttcacttccctgccattcagtatgctgtgctctacacattgtattctcattgtaccaggcatgatcactttatctctagtagcctcagttcttcctctccttctttgtttgatggagctgtgattagcactgtaactacggccacaaagaaacatttctcaattatattaaatcttcttttgcaaaggccttttagccaacattctcgttgaagatgtgaatatctgtctgcaggcatgcagcagtctacctgctctgtcctcttccttgccagatgatcttttacagaggtatgaaattaagatcatgtcttttgacattaatcctaataactttgaaatgttaacacacctgctttgtctatttcgttctttcatagatgtgttgatgtttgccatgttcaactagtgcactgtggaactcgtattcgacaagcatttggaaaactgttgaaatcaattcctttagatgttatcctaagcaataacaatcacacagaaattcaagaaatttctttagcattaagaagtcacatgagtaaagcaccaagtaatacattccacccccaagatttctctgatgttattagttttattttgtatgggaactctcatagaacagggaaggacaattggttggaaagactgttctatagctgccagagactggataagcatgaccagtcaacaattccacgcaatctcctgaagacagatgctatcctttggcagtgggccgtatgggaagctgcacaattcactgttctttctaagctgagaaccccactgggcagagctcaagacaccttccagacaattgaaggtatcattcgaagtctcgcagctcacacattaaaccctgatcaggatgttagtcagtggacaactgcagacagtgatgaaggccatggtaacaaccaacttagacttgttcttcttctgcagtatctggaatatctggagaaattaatgtataatgcatacgagggatgtgctaatgcattaacttcacctcccaaggactggctaacgcggattcgactctccatcatgagggtaggattgttggcaggccagcctgcagtgacagtgagacatggctttgacttgcttacagagatgaaaacaaccagcctatctcaggggaatgaattggaagtaaccattatgatggtggtagaagcactatgtgaacttcattgtcctgaagctatacagggaattgctgtctggtcatcatctattgttggaaaaaatcttctgtggattaactcagtggctcaacaggctgaagggaggtttgaaaaggcctctgtggagtaccaggaacacctgtgtgccatgataggtgttcattgctgcatctccagctttgacaaatcggtgctcaccttagccaatgctgggtgtaacagtgccagcccgaaacattgtctgaatggtgaatccagaaaaactgtgctgtccaaaccgactgactcttcccctgaggttataaattatttaggaaataaagcatgtgagtgctacatctcaattgccgattgggctgctgtgcaggaatggcagaacgctatccatgacttgaaaaagagtaccagtagcacttccttcaacctgaaagctgacttcaactatataaaatcattaagcagctttgagtctggaaaatttgtcaaatgtaccgagcaattagaattgttaccaggagaaaatatcaatctacttgctggagggtcaaaagaaaaaatagacatgaaaaaactgcttcgtaacatgtgaagtccagatccaagggaacctcagaaatccattgaagttccattgttaagaagttctgtttcacagtctttgccagttctaactttacgttcatgtaaacagcatgacgtgaggccgtggatgcaggcattaag

SEQ ID NO: 7138 - DNA, 3455 bp, Homo Sapiens
  NR_002555
gttggcactcatcatgagcccctgttctcattctgcaaatggtgaagctctctattgtcctgaccccacagttcctgtcccatgaccagggccagctcaccaaggagctgcagcagcatgtaaagtcagtgacatgcccatgcgagtacctgaggaaggttatcaatactctggctgaccatcatcatcgtgggactgactttggtggaagtccttggttacatgtcattattgcgtttccgacaagttataaagttgtcattaccctctggatagtttacctttgggtgtctctcctgaagactatcttctggtctcgaaatggacatgatggatccacggatgtacagcagagagcctggaggtccaaccgccgtagacaggaagggctgaggtccatttgtatgcacacaaagaaaagagtttcttcctttcgaggaaataaaattggcctgaaagacgtcattactctacggagacatgtggaaacaaaagttagagctaaaatccgtaagaggaaggtgacaacgaaaatcaaccatcatgacaaaatcaatggaaagaggaagaccgccagaaaacagaaaatgtttcaacgtgcgcaagagttgcggcggcgggcagaggactaccacaaatgcaaaatccccccttctgcaagaaaggctctttgcaactgggtcagaatggcggcagcggagcatcgtcattcttcaggattgccctactggccctacctcacagctgaaactttaaaaaacaggatgggccaccagccacctcctccaactcaacaacattctataactgataactccctgagcctcaagacacctcccgagtgtgtgctcactccccttccaccctcagcggatgataatctcaagacacctcccgagtgtgtgctcactccccttccaccctcagcggatgataatctcaagacacctcctgagtgtctgctcactccccttccaccctcagcggatgataatctcaagacacctcctgagtgtctgctcactccccttccaccctcagcggatgataatctcaagacacctcccgagtgtctgctcactccccttccaccctcagctccaccctcagctccaccctcagcggatgataatctcaagacacgtgccgagtgtctgctccatccccttccaccctcagcggatgataatctcaagacaccttccgagcgtcagctcactccccttccaccctcagctccaccctcagcagatgataatatcaagacacctgccgagcgtctgcgggggccgcttccaccctcagcggatgataatctcaagacaccttccgagcgtcagctcactccccttccaccctcagctccaccctcagcagatgataatatcaagacacctgccgagcgtctgcgggggccgcttccaccctcagcggatgataatctcaagacaccttccgagcgtcagctcactccccttccaccctcagctccaccctcagcagatgataatatcaagacacctgccgagcgtctgcgggggccgcttccaccctcagcggatgataatctcaagacaccttccgagcgtcagctcactccccttccaccctcagctccaccctcagcagatgataatatcaagacacctgccgagcgtctgcgggggccgcttccaccctcagcggatgataatctcaagacaccttccgagcgtcagctcactccccttccaccctcagctccaccctcagcagatgataatatcaagacacctgccttccaccctcagcggatgataatctcaagacaccttccgagcgtcagctcactccccttccaccctcagctccactctcagcagatgataatatcaagatacctgctgagcgtctgcggattccgcttccaccatcagccgatgataatctcaagacaccttccgagcgtcagctcactccccttccaccctcagctccaccctcagcagatgataatatcaagacacctgccgagcgtctgcgggggccgcttccaccctcagcggatgataatctcaagacaccttccgagcgtcagctcactccccttccaccctcagctccaccctcagcagatgataatatcaagacacctgccgagcgtctgcgggggccgcttccaccctcagcggatgataatctcaagacaccttccgagcgtcagctcactccccttccaccctcagctccaccctcagcagatgataatatcaagacacctgccgagcgtctgcggggagcgtctgcgggggccgcttccaccctcagcggatgataatctcaagacaccttccgagcgtcagctcactccccttccaccctcagctccaccctcagcagatgataatatcaagacacctgccgagcgtctgcggaggccgcttccaccctcagcggatgataatctcaagacaccttccgagcgtcagctcactccccttccaccctcagctccaccctcagcagatgataatatcaagacacctgccgagcgtctgcgggggccgcttccaccctcagcggatgataatctcaagacaccttccgagcgtcagctcactccccttccaccctcagctccaccctcagcagatgataatatcaagacacctgccgagcgtctgcgggggccgcttccaccctcagcggatgataatctcaagacaccttccgagcgtcagctcactccccttccaccctcagctccaccctcagcagatgataatatcaagacacctgccgagcgtctgcgggggccgcttccaccctcagcggatgataatctcaagacaccttccgagcgtcagctcactccccttccaccctcagctccaccctcagcagatgataatatcaagacacctgccgagcgtctgcgggggccgcttccaccctcagcggatgataatctcaagacaccttctgagcgtcagctcactccccttccaccctcagctccaccctcagcagatgataatatcaagacacctgccgagcgtctgcgggggccgcttccaccctcagccgatgataatctcaagacacctcccttagctactcaggaggctgaggcagaaaaaccacgcaaacccaagaggcagagggcggctgagatggaaccacctcccgaacccaagaggcggagggtcggtgacgtggaaccgtcacgcaaacccaagaggcggagggccgctgacgtggaaccatcatcacccaaacccaagaggcggagggtcggtgatgtggaaccgtcacgcaaacccaagaggcggagggccgctgacgtggaaccatcatcacccgaacccaagaggcggagggtcggtgacgtggaaccgtcacgcaaacccaagaggcggagggccgctgacgtggaaccatcatcacccgaacccaagaggcggaggttgagctga

SEQ ID NO: 7139 - DNA, 68 bp, Homo Sapiens
  NR_002560
caccagtgatgagttgaataccgccccagtctgatcaatgtgtgactgaaaggtattttctgagctgt

SEQ ID NO: 7140 - DNA, 2474 bp, Homo Sapiens
  NR_002730
gtggcacaaggcccctcttgagaagacagcccatgagacctagctggggcctgagaacatgaatcaactgatgagacagctgcagagaaaagatccaagtgctcttttcgttttctgtgattttattgctcctggctactccatcatcattaaacacccaatggatctcagcaacatgaaagaagagatcaagaacagtgaagaactaacggataacttcaaaccaatatgtactaatgccatgatttacaacaaaccagagaccacttattataaagctgcaaagaagctgttacactcagagatgaaaatttttagccaggaaaaaattcagagcctgaagcagaccacagacttcatggctaacttgaaaaaacttgaaagcagaaagacagaacagacatctcacagagtggggaggatggaggctgctggctgagagagagagagagagagagaggactctggagatgccgaagcacaagccttcaagagtcccagcaaagaaaataaaaagaaagacaaagatatgcttttaagtttaaaagcagtaatttagagagacagtaggagcagcttgactgcatcatgaaggaatctggaggaaaactgaccaggtggcttgttaacagtcagtgggaatttgaaagaagaaaaccagatggaacaagaagactgggacttccccatcctgtggatcccattgtaggagagccagaatactgccctatgagactgggaatgacaactggaagacttcagtctggagtgaatattctgcaggggttcaaagaggataaaaggaacaaagtaactccagggttatatttgaattatggaccctggagttcttatgtaccgcattatgactccacatttatgaatatcagcaaggataattcagatttaatctatgcaatctatgggggaagactgatcttccaagcaatttcagcaaccatgagtttctggccccatgccaagattacccatatgttaagacagatagtttgctggatgttttaacaaaaggaggggattccagggccctataagagttggagatatcacctgacgatgaaggccatactaggacacttgacacagcaaaacaaatggagattacacaagtagagccagcaggacatttggactctaatactcaagataggctcatggcactgaaagcagtaacaaactttggcgctccggttgaagtttttgactcttgaagaagctgaagtattccagaagaaacctgatgagaccaacaaattgctcagggagctccagctcaatgagcatttgaacacctgaccccttcccaatatgatgtctcttggatccctcatacaaagaaatgcatcttgctgaacaggtgaccaataatcttaaagaacttgtacaacaagtaactccaggtgatatcgtaagcatgtatggagttcaaaaagcaatggggatttccattccttcccctgtcatggaaaacaactttgtagatttaacagaagatcttgaagaacctaaaaagacacggagtggacctagtgggagttgaggccacctggtatttgattatgtattatgtacatacttttccattcttaacttaaaaacgctttcacaagatatcaaatatttgtaaattgtgcttttaattaaacttcggaacagtgaaaacaaacaaaaaacaccttcctggaactaattatagcaaggttacaggatacaaggttaacacacaaaagtcaatcatttttcagtatgtcaacaatgaacaagtggaatataaaaattaaaaaattcactaccatctatataagcaatcaaaaaataagataggtataaatctaacaacatatgttcaagatctatatgaagacaactataaaactcttctaaaaatgttctaagaagaactaaataaatgaatagatattccatgttcatggataggaagactcaatattgtgaacatgttggttctttccaatttgatctatagattcaacacaatcccaaccaaaatcctagcttattacttagtagattcaatgaactgattctaagtttatatgaagaggcaaaagacccagaatatccatcacaatactaaaggaaaagaacaaagttggagtactgacactacccaacttcaagacttataataaggctacagtaatcaaaacaatgtggtattagtgataaaatataaaattaatcaatacaacaaaatagagagtccagaaataggacacataaatatagtcaactgatctttaacaaaggagcaaatgcaatacaggggaaaaaacagccctttcaacaaatggtgctgaacaattggacatccacatgcaaagaaaaaaaaaagaaactagacacagaccttatattttttacaaaaattaattcaaaatggatcacagacctaaaacacaaaactataaaactccaaaaaaaaaaaaaaa

SEQ ID NO: 7141 - DNA, 609 bp, Homo Sapiens
  NR_002734
atggctactctgatctatgttgataaggaaaacgaagaaccaggcatccttgtggctacaaaggatgggctgaagctggggtctggaccttcaatcaaagccttagatgggagatctcaagtttcaatatcatgttttggcaaaacattcgatgctcccacatccttacctaaagctaccagaaaggctttgggaactgtcaacagagctacagaaaagtcagtaaagaccaatggacccctcaaacaaaaacagccaagcttttctgccaaaaagatgactgagaagactgttaaagcaaaaaactctgttcctgcctcagatgatggctatccagaaatagaaaaattatttcccttcaatcctctaggcttcgagagttttgacctgcctgaagagcaccagattgcacatctccccttgagtgaagtgcctctcatgatacttgatgaggagagagagcttgaaaagctgtttcagctgggccccccttcacctttgaagatgccctctccaccatggaaatccaatctgttgcagtctcctttaagcattctgttgaccctggatgttgaattgccacctgtttgctgtgacatagatatttaa

SEQ ID NO: 7142 - DNA, 71 bp, Homo Sapiens
  NR_002739
ccacaatgatggcaatatttttcgtcaacagcagttcacctagtgagtgttgagactctgggtctgagtga

SEQ ID NO: 7143 - DNA, 2314 bp, Homo Sapiens
  NR_002776
ggcctcgtgcgccgcgctttgagcagcagactgctcgacaaacactgcgccaagagctcctcagcagaagctcctcgcatcagatcctctgtgctgggaatcctcccctcttgagcacactctgtgctcctcttccagttacggtgcatgtgaagcaatggtatgggaaaattgtttgcagaaggatgaaaaggctttattgccaaactcttaaggtattttgttaataaaatcattttcataatggaaaagactcagaaaattcccctcgcatgacatataacatccaacaaggggctgaaccaagaaaaaatactgcagctgctgctaatggcaacactgagcaagcacctggcctgtgccaggcactgtcctgtgcagtctgtgtttgcactcattttatcctcaagagccagatgagcatctccaccagacagcacctgcagaggcttgggcagtttattttaccgtctctgagtaaaatagggataataagtaacagtacccatacacaggtggcagagacgctagggaacttgcccaaggtcacagagcttccaagtggaggagcagggacacatatgctcacaatgatggcactaaggcacatgttgcctggatggagaccagcccacagatgagagttccaggacagagggaacatggatggatcaagtgaagtgacagaacatttggaaaactctaccgagatatatacggccccccagtaaaattaaagagataaagagaactacattaagtgagacaataaggcaactctatttcttgcaggaaaaaaataattgtggttatagaacactactggttctgaggtgaatagcagtcacagagccatcaaaatatgaccccactcactgaagtaatacaaagtgctagtgtagctatcccgggaagacgtggaaggccgagcaaggaccatggcacaagaggccacgctgtacctagtatggtatgcagtggccaagaggacccccctgattccacctagtgttcatgcccacgtgtgatctcctgccccgtgagctgggcctagccactcacttctgacagacagaagccaacaaaagcaacaggatgtcacttctaagtttaggttataaacacactcagacttccatctaggctcacctcttgctcactctgatgaaagccagctgccatgctgtcagctggggagaggcccatgtggcaggaactgaggaagtctttggccacagcctgcaaggaagtgaatcctgacacaagctcactagagtgagctgggaagtagatacccttcagtcaagctttcagatgaggccacaatcctagccaacattttcatttccacccatgagaaaccttgagccagaagacccaagctaagctacacctggattcctgacccacagataccatgataacagacattattttaagctgctatgttaggagtaattagttatttaggaataaggtaactaatacatttatattaatgggaagtcagcagagaacatttaaatggataaactgagaaatggctgtgtaagtgtgtgatctggaaacaggagaaaaatgcagccctgaagaaaggagttaagagaggaaggaggagctactatgtctcattttaaatcacgtgggtggcattatttgacttctttttaagtacacggaagtgttactttcttaaatgaaaatgaaggtaacagcagcagtaaactaatttccagtagatgaaatgtgactttgtaatcccaggaaaagggaagaatttgcaccaagaagttactgttacctcagaatggcaagagcatggatggctcttatcatcatctttatacttcttttacatttcctcattttttaaaagttttgtgtacatattacatttaggaaatccaatatatagtattaaaacagaaaaagtaaagaagcaggctgggcttggtgcccactactcaatttgactggcttaaaaaaattttttaaacgacatgtacggacagacataatacttgcttctgagcctcccagtctttcaaaaccacattagggaataagcagtatttgcatggttccagtgatatctgggagtaagtgaaagtaatgaaaacacagaagtaaacacaaagtaattatagttcacctttatacacacgttaacagaaatcatctgatcccctttgctgctaagtgagttgaaaagcgaaagcgtctgaatcccaccagcatcgctggatgtgtcatccactgagccttcatctcccatgaacttgacttttaaccaatttgctagaattctacagat

SEQ ID NO: 7144 - DNA, 1089 bp, Homo Sapiens
  NR_002779
aagcgaaattatccaccctatttctggaaaaaatatcctgcaatttgtagccatcaaaaggaaggactgtggagaataggcaatcccagggggtatggtggatccaggagagaaaattagtgctacattgaagagagaatttggcgaggaagccatgaactctttacagaaatctaggaaagaaatgcaggagttggagagacaattgcacaaactcctcagtcaggaacattttgaggtctataaaggctacgtggatgattctagaaacacagataactgctggatagagacagaggctgtgaactaccgtgatgaaataatggaccatcttcctctggaagctggcgatgatgccaagaaagtgaaatgggtggacattaatgataaacttgagctttatgccagcctctcccaatttattcaacttgtggctgagaaacgaggtgcccactgatgtgaggatatgtatcctgattgccagggatagtagcttggagtctcatgtgagccaaaggccttcaaatgatcaagagtggataagaggcaaacagcacataactcccactaaacaggacagggagggtcacctctttggtgattacttccaaaactgtgctgtgtgaaggctttgtattaaggaataataatagacaaatacggggaaatgggatcacagaatttttggctttcctgttagaagaagaatatactcatatgctgtatatattgtatacatggtttaaactaacttacacagctactgctctttggagaattgtaagaaaaacaatgacatcttccttaacaaccatagcctctacttttcagccagtttgcatttgtcaattcttctttctcctgatgttttaatgtggcataatctaatgtataatctgacttttgagttaacatttattttttaaatttagctttatgtggtcttgtattccttccttttgagtatgggagctctctggcttttcctttttgtttttttagagcttcagttttatgggaaaagttcaatctctattttggtccacaaggatcaagtgcttatgaaccagaccaaaaaaaaaaaaaaaa

SEQ ID NO: 7145 - DNA, 1398 bp, Homo Sapiens
  NR_002798
caccactgctgctgctacccttgctgctgctgctgcctctgctgaatgtggagcctgctggggccacactgatccggatccctcttcgtcaagtccaccctggacgcaggaccctgaacctactgaggggatggggaaaaccagcagagctccccaagttgggggccccatcccctggggacaagcctgcctcggtacctctctccgaattcctggatgcccagtattttggggaaattgggctgggaacgcctccacaaaacttcactgttgcctttgacactggctcctccaatctctgggtcccgtccaggagatgccacttcttcagtgtgccctgctggttccaccaccgcttcaatcccaatgcctccagctccttcaagcccagtgggaccaagtttgccattcagtatggaactgggcgggtagatggaatcctgagtgaggacaagctgactattggtggaatcaagggtgcatccgtgattttcggggaagctctgtgggaatccagcctggtcttcactgtttcccgccccgatgggatattgggcctcggttttcccattctgtctgtggaaggagttcggcccccgctggatgtactggtggagcaggggctattggataagcctgtcttctccttttacttcaacagggaccctgaagtggctgatggaggagagctggtcctggggggctcagacccggcacactacatcccacccctcaccttcgtgccagtcacagtccccgcctactggcagatccacatggagcgtgtgaaggtgggctcacggctgactctctgtgcccagggctgtgctgccatcctggatacaggcacacctgtcatcgtaggacccactgaggagatccgggccctgcatgcagccattgggggaatccccttgctggctggggagtacatcatccggtgctcagaaatcccaaagctccccgcagtctcactcctcattgggggggtctggtttaatctcacggcccaggattacgtcatccagtttgctcagggtgacgtccgcctctgcttgtccggcttccgggccttggacatcgcttcgcctccagtacctgtgtggatcctcggcgacgttttcttgggggcgtatgtgaccgtcttcgaccgcggggacatgaagagcggcgcacgagtgggactggcgcgcgctcgccctcgcggagcggacctgggaaggcgcgagaccgcgcaggcgcagtaccgcgggtgccgcccaggtgatgcgcatgcgcaccgggtagcagagctagcgctactcagtaaaaatccaatatttccattgaaaaaaaaaaaaaaaaaaaaaaaaaaaaaaaaaaaaaaaaaaaaaaaaaaaaaaaaaaaaaaaaaaaaaa

SEQ ID NO: 7146 - DNA, 634 bp, Homo Sapiens
  NR_002803
gggctggagggaggcagggcacccagccggaatggcatgatcctgaagcccaacttccacaaggactggcagtggtgtggccatgtggctcagccagcccatggggcagacctgcagaagcaaggtggccagcaaaagcaggctgcatggcccactgatatgggcccatccacccatagtaaggtgccccatgctgaggcatcactacaaagcacaagctggcaggggcctcagcttggaggagttaagggtggctggcatttacaagaaggtggcccagaccattggcatctctgaggatgcaaggaggaggaaccagtccacccaggccctgcaggccaaggtgcagaggctgaaggaggaccgctcctcactcatcctcttccccaggaagcccttggcccccaagaagggagacagttctgctgaagaactcgaactggatactcagctgacaggaccagaaatgcccatcggcaatgtctacaaggagaaagccagagtcatcgctgactaggaggaaaacttccaggccttgttagtctctgtatggcccatgcaaatgcccagctcttcggcatataggcacaaagagccaaggaagctgtagaagaggacgcttaaaaaaaaaaaa

SEQ ID NO: 7147 - DNA, 2251 bp, Homo Sapiens
  NR_002804
ccaagatctcatgctcctccccacagccctcttctctgctcacacaggaagcccaggaagcctctgcctcagagatgctgccgctgctgctgccgctgcccctgctgtgggcagggccctcgctcaggatgcaagattccggctggagatgccagagtccgtgacggtgcaggagggtctgtgcatctttgtgcactgttcggtcttctacctcgagtatggctggaaagattctacccctgcttatggccactggttccgggaaggggtcagtgtagaccaggagactccagtggccacaaacaactcaactcaaaaagtgcagaaggagacccagggccgattccacctcctcggtgatccctcaaggaacaactgctccctgagcatcagagacgccaggaggagggacaacggttcatacttcttttgggtggcgagaggaagaacaaaatttagttacaaatattccccgctctctgtgtatgtgacagccctgacccacaggcccgacatcctcatcccggagttcctaaagtctggccatcccagcaacctgacctgctctgtgccctgggtctgtgagcagggaacaccccccatcttctcctggatgtcagctgcccccacctccctgggccccaggaccctccactcctcagtgctcacgatcatcccacggcctcaggaccacggcaccaacctcatctgtcaggtgacgttccccggagctggtgtgaccacggagagaaccatccagctcagtgtctcctggaaatcaggaaccgtggaagaggtggttgttttggccgtgggggtagtggctgtgaagatcctgcttctctgcctttgcctcatcatcctcaggtaagcactgcctgaagaccaaggacaggcatggggagggcagaggacatgatgctgaatcccagaatctcaatcctgggggtatgcagacagtttacgtggtcctggggccaggctggaggctgaattggtggtgagaattacacatgggccatttgtggtcagtttgtgtctgtcccaactgagggccaaatgccaggatggggagcttcctgttgtcatcaaggaagtctagacctgctcttcctccctgtgatccctccagcctctagcagggcacaggaagttgagttggctgccctttgctcccttcatgtggccacacttacaggtccttgtctcttcactcaatgtcagtttccacaagaagaaggcggtgagggcagtggaggttgaggagaatgtatatgctgtcatgggttaatctctcaggtgagtgatgtgggcctctcactcttcaacatcctgctggataactcctccacaatggcctccaggattgctctgcccatcatggccaaagttaagccaactgtcttcctcctcaaacctacttttcctgggatgtgggttcttcatcctgcagatgacaaagaggcctcatctctaaagtcagaacctgggtgtgggtctccatcttgacccccctcccttctctagatcccataaattactagctcttgtccctccttctcctaagcagggctcatcttgatgcccttttctccatcctgaccctggtcattcttgcggcctcacctcttccctgatcactgaacccttttcacctcctgcctccatctctccccaacacaggcctccagactgtacttccagatgtctcctcatccagttcctccacagtctgaatggccatgtttcctcttcattgctggagaatgaagtgcaaatgccactgcctggactgaaggcctttcacgatctgtcttctgctggactctgctcctgatcccccttctccttgcatcacccgaagtctccctacacccaccaggccaagccctctgtgattctgagactttgcatgtgtagttacttctcctgaaatggccttcctccccattcctgccaatccaggtccttatcatccttcaggttgtcttaaatgtcatccaggtgtgtgtatttttatgtaatccttgtatgatattaagcggagatgtggcatttgttcattaatttgtagacatattcagtaaccatactgaatacatataatgactatgtgccagcatttccgtatgtgcagaagttcatcaatagatatagactcaaagagctctgtcatcaagctgttgttctgaagagcagaaggatacaaataaaaagaaataagtaaaataaaaaaaaaaaaaaaaaaaaa

SEQ ID NO: 7148 - DNA, 1521 bp, Homo Sapiens
  NR_002809
ggagctgagctggggaagggagaccagggttcaccacgttagcattcgcattcctgggaggatgcagccctcgcctggacctgggcgatagacgccttcttctgtttttatttttggaggggagcgccctgtaattgtcctgaacacatgcttcccccccttcctccagccacccgcggaggagagagtcccccttttttgcatttatcttttccttcccctttctttattaaaggtccgggagtggcggcggccaatcagcgcgcggcttccattttgtgagttcaactccgaggctcccgggcttcgcgaggacgcgtttgcagccccctctgccgctcctctctggcggccgaggcgcaggagccgcctcgccggggctcggagctggtgtagctcatattggggctcttttcggggtttgtaatttggccgtgggtaggtaattggctggagcagggcggcagggcgcggcagccaatcagcgcgcggcttctatagggcttgagttattagacgctgatctcaaaacatccttcatcagacacgaaggagaggccaacagatgagggaagccatttttctgcaatggaattaaatggccaagcccaaggactcacagttggaagactggagaagactttttaaaaagatctggatttttccttatgacttggaatccatctttgtcttgtataactaggtcatagcacaccattcatgtcagcagttaacagttttgaattccaaaaaaacctaaagcagtaaacagtcctcagcgaagccgcctttttgcctacccaaccctggaaagtttgcagaagtggaaggagcagaacgtgagggtgtaacttacaaaaagcttgatcttctagactccatggcaccgggctgagcgggttctgggccggagaaggggcgacgttcgggcaccccccgaatggacaatctttccttctgtcaacggcaggggcaggcctagtttgactctgacagtcctcccactaaggaattcctggtgactggaagggggagtgactcaggccctcaacctctagcagagtgccttggctccctcctgtcgtcctggggaacctcggccccagccctgcctccccagccagtcacagctcctccctggtcaccctgagggagctcagggcccggctggtagctgggttgctctgcttctgtcccccactcctgtggagcctggcaggcaactccatgatctgaccccggttaccttgacagccctgcctggcctcccctctcatggcccagccaccccagaacctgaagaggttttctagctgccgtgcatttgccaggctgggttacccaccctactttccctgcctgccctccagtgctgccaggcctagtgtgccagccagcgctcagccttcagtaaagggttcccctgcttccaacctccattgcactgcttcccctaagactgtgacctcctggaaggctggagcacaactgcctctcaataaacgtgttgcaaaaaaggaa

SEQ ID NO: 7149 - DNA, 2613 bp, Homo Sapiens
  NR_002814
agtgctgggcgcagccgcgcctcgcgcctcccgccccccccggggctgcggcggggacgcttctctggagggtgtggcggaaacttgaggcttggagtccgcgggaccggaaggggctccgtagctcggggcagggtgggcgcgagagagcctagaagcccatgtagccgcgaatcccgcagccccagtacacctccctccgtgcctccccgccttttctgcagagctccgccctggagtgaaggaggagccgtcacctggagctccgaaaaaagcagaagaaggcgctttttatttagccagtgtgaccccgccagggccttctcggttgggtgagcactctctctgaccaggccatgaaaagaaaaatctgtgcgatgcctccccacatgtcacgggactctgacttgcctttgtcgtcagagtttgcagaactttgggggacctgagaggggagtgccccctggacgggccacggctgtctgtggcttaagggcttttggaagggcggagagagggaaacggcgtcctagtggcctgcttcagggccacccacgggccctcccccaacctctctctgatccaacttgtttttccagcctagttggaaacttgtggatgctgtgacctcaagaagacttggcattttatttggaagatagacatctatttgcaactgtcctgagcccctattttcctcccacctttcttggggaaacttgtttttaaggggtgccactgtttttgtaacatgttgctcctagctcttagcattcatggtactgttgtaaccgtccagtgggttcactttgtctgctagatagagccgatttatcaagacggggattacaatggagaaagagtaattcacgcagagccggctttgcagataaaactctgcaaagacaatgtctagcacttatatctccagtaactcctgtcaaggtttattgttgcttgttcatcattgcagtcctgactacaagtgtgattgcactttctattgttttgtcagaatttcctgaaaagatacaaaggcccttctgaccattggattggccttagaagagaatcatcccatcgcatttggaaatggacagacaacatggaatataataacatgcttgctatcagaggaagtggagaatgtgccttcctgaatgacaatggagtcaacagtggcagaatctacatgaacagaaaatggatttgtagcaagccaaacaattatgtctacagttgccagttatgtccccactgggatactacctagtagagctgtgagaagagggccaccatcctccagactccagaatggtggaatcatcagcagcttccaccatgcccctggaaaaactgcaagtaacagacctgcacatgtatcccctacatctaaaataaaagttggaaaaaatggaactttgatgttaagatgcactgatacaaaacttaaattttggtctcctacattaaaacaatatgagtctcttaaaatattgatttgttcttagtaagattacaagaggctttgatttttaattctgcaatgtttccttaacagccattctgaattacaaactaattcctatttctgccacattccttgctgagaactgtctagtcctggtttgggatttatcttaaaggtctagaaaggcaacattttacttcagcaaaacttgattctatattgttgtttttcttaatgtgtcaaaattgttttgttactaggatttcctatgttgttattaaatgtattcccctgatcaaggtcactggcctagaaaacaaagattctgtgttttaccaagataattcccagtgcttcatggtgtctttattaggctttgactgcttagggaaactgagccttaaaagggtaaaagtttttccatccatgtaactttctgaggtctttaggttgtcactctgattaaatgagtagtattcttagcagtgacttattatctgttgaaggaagtattttaagctttttgacatctttggcaggtttctctagaatccaaatcctaaattaagccttttggcctaaaattgactgggatttttccaggtggaccccctagatatgctcctccaaaggcttgtctttcttgtagagttattaaatgattaggcttatttggcaaatactgctagaagcattgtcaaataagaaatggtgttttacctttctttaagctgtgtttgtgtaagttcatcatttatagaaatgtgaaattttatgagattcctaagatactgacatgctgagatacctgtaataattgcaatttttatgttggatgattgtatgccacagaagcacttaaatttcctggttaattggtaatgttaatcagatctttacctatggctgttctgggtttttgtcattcacagttattattttaatttcttctttggaagcgttcgcaatcagctatagtccaaaattgctaattaagatcaagcaaaacaaaattaattacgtaaaattaatttataaggatgtttttatgacgtaaatgttttattttccagagccaaggaaattttctgtcacaagctatctaccgtttgcaataatttgataaataatcctttgtgaac

SEQ ID NO: 7150 - DNA, 5832 bp, Homo Sapiens
  NR_002939
aagaaagggatccaagaaatcaggggtgtggaggcaggaggccaggggccttcctgggacccctcaggaggttcccctagcaccactcgcaggcagaacagcccagcctcaccccgagggctgggtgctcctgctgctgtcctgggaggaggcacgtcagtgtccagaggggcagggggacatccaggagggctgggtgctcctgctgcgggaggtgctgctagaaaatcacttggggcttccttttggcctcccagtgagtcatgagggctgcggcacagaggggcagggagacatccagtaaaggagtgcgtgcagcgtgtggcatctgagcaaagctggagtcacaccgtgtggctggggaccgcaaactcctcactcagctccccccagcctcaatgttcccgtctgtgaagtggggcacaggaaacccgcccatcctgggtcacagggtgctggaggagcagacgggagtgggttgtgccctgcgaaactctgcacctcgggaggtggcacgtctctcccgcagcctcactggggtgtgtgtggcccaacctggggatccccgccggcttctccactcccttggctgcctccaggctcagcagaggtggtttctgtccttcggtttggatgaaggtggttggctcagcggagaccatctttctctgagtcctccggaggctgagagcaaacggctgcactaggaacccagcagtcagaccggcccccaccctggagtgaacacatcgccactgccaggcatcgcagggaggattaccccaatggcacctggctgggcgacgagaacaaccccgagatgcgggtgcactgcgccatcatcccctccgacatgctgcacatcagcaccaactgccgcacggccgaggagatggtgctcacgctgctggactacctcttccaccgcgaggtgcaggctgtgtccagcctctcggggcagggcaagcacgggaagaagcagctggacccgctcaccatctatggcatccggtgtcaccttttctataaatttggcatcacagaatctgactggtaccgaatcaagcagagcatcgactccaagtgccgcacggcgtggcggcgcaagcagtggggccagagcctggtggtcaagagcttctcgcggagaatgcccaactcatcctcctactgcccctcagagccgatgatgagcaccccacctcctgccagagagctcctgcagccacagctgcagccgcaggccctgcactacgcgctggccaacgtgcagcaggtgcagatccaccagatcggagaagacggacaggtgcaagtaggacacctccacatcgccaaggtgccacagggggagcaagtccagatcacgcaggacagcgagagcccgtgttctggtactacgtgaaggaggtcctcaacaagcacgagctgcaagcgcttctactccctgcgccacattgcctcagacgtgggccggggccgcacctggctgcgctgtgccctcaacgaacactccctggagcgctacctgcacatgctcctggccgaccgctgcaggctcagtactttttatgaagactggtcttttgtgatggatgaagagaggtccagtatgcttcctaccatggcagcaggtccgaactccatactctttgcgattaacattgacaacaaggatttgaacgggcagagtaagtttgctcccaccgtttcagacctcttaaaggagtcaacgcagaatgtgaccttgctgaaggagtccacgcaaggagtgagcagcgtgttcagggagatcacagcctcctctgccatctccatcctcatcaaacctgaacaggagaccgaccccttgcccgtcgtgtccaggaatgtcagtgctgatgccaaatgcaaaaaggagcggaagaagaaaaagcaagtgaccaacattatctcatttgatgatgaggaagatgagcagaactctggggacatgtttaaaaagacacctggggcaggggagagctcagaggacaactccgaccactcctctgtcaatatcatgtccgcctttgaaagccccttcgggccaaactccaatggaagtcagagcagcaactcgtggaaaattgattccctgtctttgaacagggagtttgggtaccagaagcttgatgtgaaaagcatcgatgatgaagatgtggatgaaaacgaagatgacgtgtatggaaactcatcaggacggaagcacaggggccactcagagtcgcccgagaaaaacggagcacactctgtcacccaggctggagtgcagtggcacgatctcggctcactgcagcctctgcctcccgggttcaggtgattctgctgcctcggcctcccgtgtagctgggattacaggcgcgcaccaacacacccgactaatttttgtatttttggtagagacggggtttcaccgtgttggccgggctggtcttgcactcctgacctcacgtgatctgccccaccttggcctcccaaagtgctgggattacgggtgtgaaccactgcgcccagccccaagtggctttttcaattacatgagccaacatattctcacaagtccattcgagtttggtgtctgttacttgcaaataagggagttctgattggttcccagtgaaacctcatctgtaagacctctgagccaccagtatccacggggcttgtcctataacagctcctgtgcaatccagtaaccttgaacactggaagccactgagcccttctgtgagtagatgcacacctctgaggctaagattactggtgtactcattgggaccagtttggtctcagtgactgaaaactcaacccaaacttgttcatttggaaaggaaaagtcaaccaggcacagtggctcatgcctgtagttccggcactttgggaggctgaggtggacagatcgcttgagcccaggggttcaagaccaacctgggcaacatagcaaaaccctgcctctacaaaaaaaaaaaaaattctttttttttcgagacagagtctcgcactgtcgcccaggctggagtgcagtggtgcaatcttggctcactgcaatctctgcctcccgggctcaggcgattctcctgcctcggcctcccgagtagttggactacaggcgtgcaccagcagggccagccgatttttgtatttttagtagagacggggtttcacaatgttggccaggatggtctcgatttcttgacctcgtgatctgcctgcctcggcttcccaaagtgccgggattacaggcgtgagccaccggtgcctggcctctacaaaaaaatattttaagttggcaggcatgatggtgcatgcctgtagtcccaaatgggcaaagttgttctctgattggctgaggtctttgtcacctgctccacccctgagctggagccccacccaaagtaattgactgaaagggggtgttctccagtgggaaattaggtaaggtttacattatttggccctaactcttcacccttccccctacccatgcccttggccatgtaattttgcagtgccctcctgtcacaggcaggatgacctgatgcctcttttttcttttttgagatggagtctcactctgtcgcccaggctggagtgcaatggtgcaatctcagctctctgcaacctccacttcctgggttcaagagattctcctgcctcagcctcctaagtagctgggattacaggcgcctgccaccacacccagctaatttttgcatttttagtagagaaagggtttcgccatgttggccaggctggtcttgaactcctgacttcaggtgatcctcctcgcctgccttgcctcccaaagtgctgggattacaggcataagccaccacgcccggccctgcctcttgagctggggagttcaagaccagcctgggcaacataatgagatttcagctctattaaaaataataataattaaaaaaaaaaagaatggccctacctttcactggcagggaagggtggagggccctcctgtcatctccaaatcatagtactgtccccaccagccatagctgatcattttaggagtggttccaaggagtcccaagctgggcccattacagcctctcctggagggttacaatttgatgagaagccaatcgatatcctctataattaaaaatataagaacttaggagtcatggggcagctgtgtttagttgaaagcctagagaagcagagagagtccatgtgtttgttacttacggtaatgctggctgctggaacagataagccccgaaatctctgtggcttaacatcacagaagtttattacctgctcagataacagtctaaggcagatgtgccacatggcgattcagggactgctaccttgtggttctgctgtctctcggggcctcggctggtagatagcaaacaatgcagacaggagaagacagatccatgatcttaaccatctcagccccagacaggggaccgcgtcatttccacccaccttccatcagcaagaaccagtcacatgagcacatctaacagcaatgaaggctgggaaatacgtgcccaggaagggaggaatcagtttctttgcagaggagagagggaacagaagagagggaaagggggaaaatagagagacggagggagagaaagagagaagaactaatgagcacagaactaagaaagcccaggcacagtggctcacatcagtaattctagggccttgggaggcaagacaagagaatcacttgaggccatgagttcgagggcagcctgggcaacatagtgggaccctatctccacaaaaataataatattattattattaaataaaataaaaggaagagacagcctgagcattagagcgagactccatctcaaataaataaattaattaacatttcagcaaaatacacacatgcacacagacaaagaaaatatgacaaaatggtaattattgaatttcaggataggtgtatgagtgacaattataccactttttcaactcttctatgtttagatgctttgaatatttaaagctaggggctgggtgcagtggctcatgcttgtaatcatcatattttgaggggctgaggtgggagcatagcttgagcccagcagttcgaggctgcagtgagctatgatcacgccactgccctccgggctgggcagcagagcaagaccctgtctcaaaaaaatataaaataaaatgaaataaatctggggagcacgtgggggagggactagtgcatcacagcctaattgaacgagcaggagactgccatgggatgaggccaggcccaactgtgtcagtccctctgggtcattctaaggacttcggattctatcctgaatgcatgaggaaacccttgaaggccttaagcagagagtgacatggtctgattttcttttaagctgtagctttgtttttgagatggggtcttgctaaattgcccaggctagtctcgaactcctgggctcaagtgattctcctgccccagcctcccaagtagctgagattgcagataagtgccaccacgcccagctaatttttgtatttttagtagagacggggtttcaccatgttggccagactggtctcaaactcctgacctcaagtgattcgcttgcctcagcttcccaaagtgctgggatgacaggtgagagccactgtgcccagccaattgtacatttttaaataactcaaagagtgtaattgaattgtttgtaacacaaaggataaatgcttgatgtaatggatccccatttaccctgatgtgattattatgcattgcatgcctgtattaaaacatctcatgcaccccataaaaaaaaaaaaaaaaaaaca

SEQ ID NO: 7151 - DNA, 7238 bp, Homo Sapiens
  NR_002940
ttttttttttttttaccaattatattattcccttctccccaagaagtgggcagaaaagctttgttaacctccttttacagatgaagaaaaacaagatcagaggtgctaagtgctgtagcctagtgccaggtcttctggccccaattctgggttctccccaagcccatgcttcttccactttctcacaatctttacttcttcctctgaccctcaccaccacccaaaatgcttttaattctggaaaagaaacccagctgcacactggcacacttgaccttcctgcagtcagaagccttggctgattccccatccaaaatattagagatgaaatgaaagcaaagtaggcatctgacaaaagttgctttttcccttctgcattttaggacctcaagtaatgtttatccagaaactgctatcataccagagattcactgtgtatttaacaacataggcatacaatctggcaaatttgaaaaactcttaacatacaccccaaatccctgcccaaatttaagaactagggtggacacagtgcttttttccatgtcgcatcttctgtgatggggctacgatatgtgggagcagagaatggggagggtggagcgcatgccagatgaggatctatcagcaatgggagggggcctccactttagcatctccaccctgctcctctcagaggaccgcctttcattgcattcagctgtgatggtagcaagaacacaggcgcaccgaggacgaggagagcgggagccttgtgctctctctgcatctgaggcaggacagcacagggtatggagcagtctgcagagaggccagctcatcagctcatcagggaagcacttgtcttccaccttgggctttgactgagcactgggcaattggaccctggggatcaatgaaataatcctaagcagagttactctatgtcacactatggaatgttccaagtagatggccgtgttttcaaaagatatattttctccttttgttgttgccatttcataggtttaggattgggtgtgtgtgtctcctctctgaatggcactcaaatgtttgctgactcctactctgcgtgactggggtgtacagctatggactgatgcatcccatcccatcatctttcacgagcaaagcagtctcttttttgacagctgaagaagaatctgtagggaatccagaaggagcattcatgaagatgttacaagcccggaagaattacacaagcactgagctgactgttgagccggaggagccctcagacagcagtggcatcaacttgtcaggctttgggagtgagcagctagacaccaatgacgagagtgatgttatcagtgcactaagttacatttgccatatttctcagcagtaaacctagatgtggaatcaatgttactaccgttcattaaactgccaaccacaggaaacagcctggcaaagattcaaactgtaggccaaaaccggcaaaaagtgaatagagtcctcatgggcccaatgagcatccagaaaaggcacttcaaagaggtgggaaggcagagcatcaggagggaacagggtgcccaggcatctgtggagaacgctgccgaagaaaaaaggctcgggagtccagccccaagggagctggaacagcctcacacacagcaggggcctgagaagttagcgggaaacgccatctacaccaagccttcgttcagccaagagcataaggcagcagtctctgtgctgacacccttctccaagggcgcgccttctacctccagccctgcaaaagccctaccacagatgagagacagattgaaagacaacacacactatttccattttagaaagtgcaaaggctagagttacaaatatgaaggcttctaaaccaatttcacattccagaaaaaaataccgctttcacaaaactcgctccgcatgacccacagaacacccaaggtcaaaaagagtccaaagttcagaaagaaaagttatctgagtagactgatgctcgcaaacaggcctccgttctctgcagcgaagagcctcataaattccccttcacaaggggctttttcatccttaggagacctgagtcctcaagaaaacccttttctggaagtatctgctccttcagaacattttatagaaaccactaatataaaagacacaactgcaagaaatgccttggaagaaaatgtttttatggaaaacactaacatgccagaagtcaccatctctgaaaacacaaactacaatcatcctcctgaggcagattccgctgggactgcattcaacttagggccaactgttaaacaaactgagacaaaatgggaatacaacaacgtgggcactgacctgtcccccgagcccaaaagcttcaattacccattgctcagtttgaaattcagctaacccagcagctacagtcccttatccccaacaacaatgtgagaaggctcatttctcatgttatccggaccttgaagatggactgctctggggcccatgtgcaagtgacctgtgccaagctcatctccaggacaggccacctgatgaagcttctcagtgggcagcaggaagtaaaggcatctgagatagaatgggatacggaccaatggaagactgagaactacattaatgagagcacggaagcccagagtgaacagaaagagaagtcgcttgagctcacaaaagaagttccaggatacggctatactgacaaactcatcttggcattaattgtgactgaaatactaatgattttgattatacttttctgcctcattgtggtttaggattgggtgtgtgtgtctcctctctgaatggcactcaaatgtttgctgactcctactctgcgtgactggggtgtacagctatggactgatgcatcccatcccatcatctttcacgagcaaagcagtctcttttttgacagctgaagaagaatctgtagggaatccagaaggagcattcatgaagatgttacaagcccggaagaattacacaagcactgagctgactgttgagccggaggagccctcagacagcagtggcatcaacttgtcaggctttgggagtgagcagctagacaccaatgacgagagtgatgttatcagtgcactaagttacatttgccatatttctcagcagtaaacctagatgtggaatcaatgttactaccgttcattaaactgccaaccacaggaaacagcctggcaaagattcaaactgtaggccaaaactggcaaaaagtgaatagagtcctcatgggcccaatgagcatccagaaaaggcacttcaaagaggtgggaaggcagagcatcaggagggaacagggtgcccaggcatctgtggagaacgctgccgaagaaaaaaggctcgggagtccagccccaagggagctggaacagcctcacacacagcaggggcctgagaagttagcgggaaacgccatctacaccaagccttcgttcagccaagagcataaggcagcagtctctgtgctgacacccttctccaagggcgcgccttctacctccagccctgcaaaagccctaccacaggtgagagacagattgaaagacaacacacactatttccattttagaaagtgcaaaggctagagttacaaatatgaaggcttctaaaccaatttcacattccagaaaaaaataccgctttcacaaaactcgctccgcatgacccacagaacacccaaggtcaaaaagagtccaaagttcagaaagaaaagttatctgagtagactgatgctcgcaaacaggcctccgttctctgcagcgaagagcctcataaattccccttcacaaggggctttttcatccttaggagacctgagtcctcaagaaaacccttttctggaagtatctgctccttcagaacattttatagaaaccactaatataaaagacacaactgcaagaaatgccttggaagaaaatgtttttatggaaaacactaacatgccagaagtcaccatctctgaaaacacaaactacaatcatcctcctgaggcagattccgctgggactgcattcaacttagggccaactgttaaacaaactgagacaaaatgggaatacaacaacgtgggcactgacctgtcccccgagcccaaaagcttcaattacccattgctcagtttgaaattcagctaacccagcagctacagtcccttatccccaacaacaatgtgagaaggctcatttctcatgttatccggaccttgaagatggactgctctggggcccatgtgcaagtgacctgtgccaagctcatctccaggacaggccacctgatgaagcttctcagtgggcagcaggaagtaaaggcatctgagatagaatgggatacggaccaatggaagactgagaactacattaatgagagcacggaagcccagagtgaacagaaagagaagtcgcttgagctcacaaaagaagttccaggatacggctatactgacaaactcatcttggcattaattgtgactgaaatactaatgattttgattatacttttctgcctcattgtgatgtgttgtcaccgaaggtcattacaagaagatgaagaaggattctcaaggggcattttcaggtttctgccacggaggagatgctcttcacgaagggagagtcaggtacattggaggattcattgctgtggccagggaaggcagaggacatgcaaaattagtatttccctttctatcttctaggatggacttttttcattcagacggccgctctggcttaaagatatgtacaaacctctcagtgccacaagagtaaataatcacgcatggaagctgcacaagaagtcatctaatgaggacgagatcctcaacagggaccctgggtaaatgacggagccctcacaggtcccatctaaaatgaggagggggtgagaagcttaattgctcctttcaagaatcaaaaccttggcattgttattcttatcccagggacagcgaagccccaacagagaagggggaggagagtgaagccctgccataggaggagaacccagcccacctcaggcctcctgcaaaaacacatagcataaacaataccatcagaaagaaaagcaggactgaagccagcggcccacacatccacagaggcagcgggcagagcaagcacagggccatcgttcctgcccttgtttcccagtctaattagtcacccagacctgaaaacatatcctcagggggtggagattttacaattaccattgtttttggtgccctctcccttgcttcatcaagcatcagtcatataataccacagatttgaactcctgcccacaggggacctcccatctcctggcccctatcataggatcactgggcctacctgcactgtggggccaagccctgtctttttcccaagccctcaagcacacgcatgagtgttcatcccgacttggtagggggcttttcacccttacaagatggcaaaagattcacattgcttttttaaaaatttgtttttctttttaaaaatcccaacccttggatagcagggaggtgctggaggggtagagtcaagaagagtgtgagaacagtaatttcccaagactgccctctgtgggactgtatttcagaaaacacactggtggggctacctctcaattcacatgtactgccctagcctctccccatccccggctgacgctcatccataactgcactgttccataacagcagtagaatgttgcagaaagtgctaggattcctccactccatcttcaaagaaaaagtcgctaataaatcacatttggtaggttagtgaatgttaaacacattagtgagcaaaagaaaataggaatgaacaagaattggtcatctacctaactgaacacaaatgaactctggcagttcagtaataggaggtaaagaaccacgctaattgcagaacagcagcccccctaccttcccaggagcagtgtgactgggaagcagccccgtgtgtatgctggtgcaggttctaagcaaagtgagctgcccatcagttccgatgagtttgctgatgctagacatatgacatctgttctcttgctgcctgccccagttatctcccaaagttctttactgagaatgaaaagcatctttctctgtgtggtgacttcagtaggccaacaaatatttgagtttaaagcacaagactagtcataggcagagcagcgctaccatttacaatttgcttacttgatgctaaaccgtgggtttggcattttacagtcatatcatctagcccagcaagtcatggaagcatagttgttaaaatcatctgacactttgggaggctgaggcgggcggatcacgaggtcaggagattgagaccatcctggctaacatggtgaaaccctgtctccactaaaaatacaaaaaaattagccgggcgtggtggcaggagcctgtagtcccagctactcaggaagctgaggcaggagaatggtgtgaacctggaaggtggagcttacagtgagctgagatcacgccactgcactccagcctgggcaagtgagactccatctcaaaaaaaaaaaaaaaaaaaaatcatcatctgacagataaggatacagggctcgaagaacgaaggtgacctgcccaaagtgtccaaagccacacatacaaagcaacaaattagggttttaagctagcactgttagacttcaaagcctcttaaccattctactgccctgctgtagggcatggggagatggggggataagccatggttgccatcaaagagttaatataacaataacatgcagatggatggcagctcctgtttattggcaccagctgtggtccaggtacagcgctaagcactataattacactgttaagtcatcagaacagaagctccccacaccagctctaataggggtgagtgttggacataagcagggagctgagaagaagccaagacaaggccggttgcagtgactcatgcttgtaatcccagcactttgggaggctgaggtaggtggaccacctgaggcaggagttcaagaccaccccggccaatatggcaaaaccctgtctctactaaaaattacaaaaattagctgggggtggtgatgcacgcctgtaatcccagttactcaggaagctgagggagggagaattgcttgaacctgggaggcggagcttgcagtgagcttataatgggccactgcacactagcctgggcaacagagcgagattccatctcaaaaaaaaaaaaaagccaaca

SEQ ID NO: 7152 - DNA, 983 bp, Homo Sapiens
  NR_002941
gtggcacagctggcttgagcaactgaactggaaacaagatgcaggaccccaacgcagacactgagtggaatgacatcttaacgcaaaaagggtatcttaccccccaaggaaagtctgaaagaattggaagaggaggcagaagaggagcagcgcatcctccagcagtcagtggtgaaaacatatgaagatatgactttggaagagctggaggatcatgaagacgagtttaatgaggaggatgaatgtgctattgaaatgtgcagacagcagagactggctgagtggaaagcaactaaactgaagaataaattttgagaagttttggagatctcagggaaggattatgttcaagaagttaccaaagctggtgagggcttgtgggtcatcttgcacctttacaaacaaggaattcccctctgtgccctgataaatcagaacctcagtggacttgccaggaagtttcctgatgtcaaatttatcaaagccatttcaacaacctgcatacccaattatcctgataggaatctgccccgatatttgtttacctggaaggagatatcaaggctcagtttattggtcctctggtgtttggtggcatgaacctgacaagagatgagttggaatggaaactgtctgaatctggagcaattatgatggacctggaggaaaaccctaagaagccgattgaagatgtattgctgtcatcagtgtggcactctgtcctcatgaggagggacagcgattctgagggtgactgaggctacagctgctatcacatgccgaactttcttgtgacaaatgtctggattttttaaaaaaggaaaaagcaagaatgaatccttctggtttttagttttgtataaattatgtttcaaatctttacattttggaaataatcattgctggaaattctgttaaatattttggaacttttttttaaattatagtatttcctctaaaaaaattaaaaccagccattagta

SEQ ID NO: 7153 - DNA, 1354 bp, Homo Sapiens
  NR_002944
tttctgcccgtggacaccgccgaagaagcatcgttaaagtctctcttcaccctgccgtcatgtctaagtcagagtctcctaaagagcccgaacagctgaggaagctcttcattggagggttgagctttgaaacaactgatgagagcctgaggagccattttgagcaatggggaacgctcacggactgtgtggtaatgagagatccaaacaccaagcgctccaggggctttgggtttgtcacgtatgccactgtggaggaggtggatgcagctatgaatgcaaggccacacaaggtggatggaagagttgtggaaccaaagagagctgtctccagagaagattctcaaagaccaggtgcccacttaactgtgaaaaagatatttgttggtggcattaaagaagacactgaagaacatcacctaagagattattttgaacagtatggaaaaattgaagtgattgaaatcatgactgaccgaggcagtggcaagaaaaggggctttgcctttgtaacctttgacgaccatgactccgtggataagactgtcattcagaaataccatactgtgaatggccacaactgtgaagttagaaaagccctgtcaaagcaagagatggctagtgcttcatccagccaaagaggtcgaagtggttctggaaactttggtggtggtcgtggaggtggtttcggtgggaatgacaacttcggtcgtggaggaaacttcagtggtcgtggtggctttggtggcagccatggtggtggtggatatggtggcagtggggatggctataatggatttggtaatgatggaagcaattttggaggtggtggaagctacaatgattttggcaattacaacaatcagtcttcaaattttggacccatgaagggaggaaattttggaggcagaagctctggcccctatggcggtggaggccaatactttgcaaaaccacgaaaccaagtggctatggcggttccagcagcagcagtagctatggcagtggcagaagattttaattaggaaacaaagcttagcaggagaggagagccagagaagtgacagggaagctacaggttacaatagatttgtgaactcagccaagcacagtggtggcagggcctagctgctacaaagaagacatgttttagacaaatactcatgtgtatgggcaaaaaactcgaggactgtatttgtgactaattgtataacaggttattttagtttctgttctgtggaaagtgtaaagcattccaacaaagggttttaacgtagatttctttttgcaccccatgctgttgattgctaaatgtaatagtctgatcgtgatgctgaataaatgtctttttttt

SEQ ID NO: 7154 - DNA, 139 bp, Homo Sapiens
  NR_002992
gacctcctgggatcgcatctggagactgcctagtattctgccagcttcggaaagggagggaaagcaagcctggcagaggcacccattccattcccagcttgctccgtagctggtgattggaagacactctgcgacagtg

SEQ ID NO: 7155 - DNA, 134 bp, Homo Sapiens
  NR_003028
gggtcatttcaaagagggcttatgaggctgtgaaacccagagctcttaacgctgtgaccaaagatggaagttctctataggaagccatagcactcctaatgtttggtgctatgttttcctgaggagatataaaa

SEQ ID NO: 7156 - DNA, 641 bp, Homo Sapiens
  NR_003040
gggtgcagtggctcacgcctgtaatcccagcactttgggaagccaaggtgggtagatcatttgaggtcaggagttcgagaccagtttggccaacatggtgacaccctatctctacgaaaaatacaaaaatcagccccttttcacaagatggcaccaaaagctaagaaggaagctcctgcccctcctaaagccaaagcaaggctctgaaggccaagaaggcagtgttgaaaggtgtccacagccacaaaaaaaagaagatccgcgtatcactagccttctggcggcccaagacattgcgactccggaggcagtgcaaatatcttaagagcacccccaggagaaacaagcttgaccactatgcatcatcaagtttcctctgaccactgagtctccatgaagaagacagaagacacacgcacttgtgttcactgtgaatgttaagccacagcaccagagaagctctatgacactgatgtggccaaggtcaacaccctgattcggcctgatggagagaaggaacatgttcgactggctcctgattacaatgctttggatgttgccaacaaaatagggatcatctcaactgagtccagttggctaattctaaatatatgtatatcttttcaccattaaaaaaaaaa

SEQ ID NO: 7157 - DNA, 104 bp, Homo Sapiens
  NR_003041
atccttttgtagttcatgagcgtgatgattgggtgttcatacgcttgtgtgagatgtgccacccttgaaccttgttacgacgtgggcacattacccgtctgacc

SEQ ID NO: 7158 - DNA, 2846 bp, Homo Sapiens
  NR_003085
agccaatgggagttcaggaggcggagcgcctgtgggagccctggagggaactttcccagtccccgaggcggatcgggtgttgcatccatggagcgagctgagagctcgagaacctgctaaggccatcaaacctattgatcggaagtcagtccatcagatttgctctgggcaggtggtactgagtctaagcactgcggtaaaggagttagtagaaaacagtctggatgctggtgccactaatattgatctaaagcttaaggactatggagtggatcttattgaagtttcagacaatggatgtggggtagaagaagaaaacttcgaaggcttaactctgaaacatcacacatctaagattcaagagtttgccgacctaactcaggttgaaacttttggctttcggggggaagctctgagctcactttgtgcactgagcgatgtcaccatttctacctgccacgcatcggcgaaggttggaactcgactgatgtttgatcacaatgggaaaattatccagaaaaccccctacccccgccccagagggaccacagtcagcgtgcagcagttattttccacactacctgtgcgccataaggaatttcaaaggaatattaagaaggagtatgccaaaatggtccaggtcttacatgcatactgtatcatttcagcaggcatccgtgtaagttgcaccaatcagcttggacaaggaaaacgacagcctgtggtatgcacaggtggaagccccagcataaaggaaaatatcggctctgtgtttgggcagaagcagttgcaaagcctcattccttttgttcagctgccccctagtgactccgtgtgtgaagagtacggtttgagctgttccgatgctctgcataatcttttttacatctcaggtttcatttcacaatgcacgcatggagttggaaggagttcaacagacagacagtttttctttatcaaccggcggccttgtgacccagcaaaggtctgcagactcgtgaatgaggtctaccacatgtataatcgacaccagtatccatttgttgttcttaacatttctgttgattcagaatgcgttgatatcaatgttactccagataaaaggcaaattttgctacaagaggaaaagcttttgttggcagttttaaagacctctttgataggaatgtttgatagtgatgtcaacaagctaaatgtcagtcagcagccactgctggatgttgaaggtaacttaataaaaatgcatgcagcggatttggaaaagcccatggtagaaaagcaggatcaatccccttcattaaggactggagaagaaaaaaaagacgtgtccatttccagactgcgagaggccttttctcttcgtcacacaacagagaacaagcctcacagcccaaagactccagaaccaagaaggagccctctaggacagaaaaggggtatgctgtcttctagcacttcaggtgccatctctgacaaaggcgtcctgagacctcagaaagaggcagtgagttccagtcacggacccagtgaccctacggacagagcggaggtggagaaggactcggggcacggcagcacttccgtggattctgaggggttcagcatcccagacacgggcagtcactgcagcagcgagtatgcggccagctccccaggggacaggggctcgcaggaacatgtggactctcaggagaaagcgcctgaaactgacgactctttttcagatgtggactgccattcaaaccaggaagataccggatgtaaatttcgagttttgcctcagccaactaatctcgcaaccccaaacacaaagcgttttaaaaaagaagaaattctttccagttctgacatttgtcaaaagttagtaaatactcaggacatgtcagcctctcaggttgatgtagctgtgaaaattaataagaaagttgtgcccctggacttttctatgagttctttagctaaacgaataaagcagttacatcatgaagcacagcaaagtgaaggggaacagaattacaggaagtttagggcaaagatttgtcctggagaaaatcaagcagccgaagatgaactaagaaaagagataagtaaaacgatgtttgcagaaatggaaatcattggtcagtttaacctgggatttataataaccaaactgaatgaggatatcttcatagtggaccagcatgccacggacgagaagtataacttcgagatgctgcagcagcacaccgtgctccaggggcagaggctcatagcacctcagactctcaacttaactgctgttaatgaagctgttctgatagaaaatctggaaatatttagaaagaatggctttgattttgttatcgatgaaaatgctccagtcactgaaagggctaaactgatttccttgccaactagtaaaaactggaccttcggaccccaggacgtcgatgaactgatcttcatgctgagcgacagccctggggtcatgtgccggccttcccgagtcaagcagatgtttgcctccagagcctgccggaagtcggtgatgattgggactgctcttaacacaagcgagatgaagaaactgatcacccacatgggggagatggaccacccctggaactgtccccatggaaggccaaccatgagacacatcgccaacctgggtgtcatttctcagaactgaccgtagtcactgtatggaataattggttttatcgcagatttttatgttttgaaagacagagtcttcactaaccttttttgttttaaaatgaacctgctacttaaaaaaaatacacatcacacccatttaaaagtgatcttgagaaccttttcaaaccagaaaaaaaaaaaaaaaa

SEQ ID NO: 7159 - DNA, 2839 bp, Homo Sapiens
  NR_003087
ttcccgtctccctccacaccttgcctcctccaggcccaaccccattccaccagcaccccgccccaggcgcactggctaggactggaaggcaaggactaaggtgaaagctgactgcccgcaccgccccaggcgcactgggtaggactgaaaggcagggactaaggtgacagctgactctgccggggcggagtgcgtgtcctcccaccgtgctggcgctgaactgactgtccgctgccaagggaagtgacagccgcagccgggctctcagccagcggccaggcgccccgcggaccatgctctccagtacgcagaacgcgggcggctcctatcagcgggtccgcggggcgcttgatacacagaaatgcagtccagagaaaagtgcctcatttttcagtaaagtgacatattcctggtttagcagagtaattactttaggctataagagacctttggaaagagaggatctttttgaactaaaggaaagtgattccttctgcactgcgtgtcccatctttgaaaaacaatggagaaaggaagttttaaggaatcaagagaggcaaaaagtaaaggtatcttgttataaagaggcacatatcaagaaaccatctctactctatgcattgtggaacacctttaaatccatcctgattcaagttgccttattcaaagtgtttgctgatattttgtccttcactagcccactcataatgaagcaaattatcattttctgtgaacacagctcagattttggctggaatggctatggctatgcagtggcacttcttgttgtagtctttttgcaaactctgattcttcagcaatatcaacgttttaacatgctcacctcagcaaaagttaagacagctgtaaatggactgatctacaaaaaggccttacttttatcaaatgtttctcgacaaaagttttccactggggaaattattaacttgatgtcagcaactcatggacttgacagcaaacctcaatctcctctggtctgccccttttcaaatcctaatggccgtatatctcctttggcaagagctgggtccagcagtgttagcaggggtggcagtccttgtgtttgttataccaataaatgctttagctgcaactaaaataaaaaagttaaaggtaagaaaatgactgcctcatgttacatgtgtcaaacaggagctgagttttctgacttgagttaacaatcaccatctcgctaattatatagagagagttacaaatggaagtcatcgaattttatcatttacttattcactcaaccagtattgaacaagcatgtatcttatgtcagccagtgtttcaggcacaggaagtacagcagtgaggggaaatgacaagtccagctctcatgaggggtagtggaggagacaggcattaagcaagtacataaatagagagaaaacatttgtatatgaaaaagatttagtaaaatacagtgatgaagagacaaaggatgccattttacatttaggatcaggaaagtcctcagaaagggaatggtatatcaacagggtgaaggagtaattcaagtggacatctgagggaaagacacaccaagcaaagggaagagtatgcatgcagcctggaggtaggggtatgcttggttgtttgaaaagtgaagtactgcagcaagcagacaggaaatgcttcactaaattaatgttgatattcttcctttatattcagtcattcatcttaccatcaatatatgttttgacatcccgccatgtgttagacagtgtgcactatgctatactctaagaaatggagaaaccacagagttcactgcattgaaggaaatcacactgcaatgagatagatgctttcatatgttaaattaacagaggtggatgtattgcttatgaaaacattttataattttaaatggatcaaagattaacaatatatattgacatggaaacatgtcaatcatattttaaagcaaaaaggagattaaatatatgcatgtatatcatacatatgtgtagctatatcattgatccattattaaaatgtgaatatacctatacacatgtgtgtaatggagaggtaaatagatgaagatacatagctataaatatatttgcataagcatagaagtaatctagagataaagcatcagtctttaaagaatagttacctgtaaagtagaattagacagaaggaggatagatttttacttctgactttaataccccaagtgactaaaaattgtatagtattttatatttttcttaatttttcaaataaaagatgactggtttttaaacataaaaactagaaaatagcatatatttatgaagtaaaggtacttagcatgctagtgtttagaataacagatttgtttataacaaatatttttaactagttttaaaaaatatattctggattttaaaaactgctatttaaaggcacattattaagaatggaaaaatattttttgaaccttaatctagagtcctataaccttcaaagatatttcaatattatatccaaatatactaaataaaaaatatgactttaggcccggcgcagtggctcatgcctgtaatcccagcactttgggaggccgaggcgggcagatgacctaaggtcgggagttcgagactaaactgaccaacatggagaaaccccgtctctactaaaatataagattagccgggcatggtggcacgtgcctgtaatctcagctactcaggaggatgaggcaggagaatcacttgaacctgtaaggcggaggttgcagtgagccgagttcatgcaattgcactccagcctgggcaacaagaacaaaactccgtctcaaaaaaaaaaaaaaaaa

SEQ ID NO: 7160 - DNA, 1783 bp, Homo Sapiens
  NR_003110
gtgccgcgtcgctttcttttcttcctctggagcagttatggcggcggcgaagaccctgaaccccaaggccaaggtggccggagcgcaggcggcgctggcgttcaacattagcggggcgcggggtctgcaggacgtgctgaggaccaacctggggcccaaagggaccataaagatcaaattcaacacccaacagcttccttaatagcaaaggtagcaacagcccaggatgatataactggtgatggtacgacttccaatgtcctaatcattggagagctgctgaaacaggcagatctctacatttctgaaggccttcatcccagaataatcactgaaggatttgaagctgtgaaggaaaagcccttcattttttggaagaagtcaaagtaagcagagagatggacaaggaaacacttaaagatgtggccagggcatctctttgtactaaagttcatgctgaacttgcagatgtcttaacagaggctgtagtgggctccattttggccattaaaagaaaagatgaacctattgatctcttcatgattttgtgatcattgacaagaaacataaatctgaaactgatacaagagaagtgaattctggcgttttttacaagagtgcagaaagagaaaaactcataaaagctgaaagaaaattcattgaagatagagttaaaacaaataatagaactgaaaaggaaagtctgtagtaattcagataaaggatttgttattaatcaaaagggaattgaccccttttccttagatgctctttcaaagaaggcatagtcgctcttcacagagctaaaaggaggaatatggagaggctgactcttgcttgtggtggggtggccctgaattcttttgaggacctaagtcctgactgcttgagacatgcaggacttgtatatgagtatacattgggagaagttcacctttattgagaagtgtaacaaccctcgttctgtcacattattgatcaaaggaccaaataagcccacacttagatcaaagatgcagtaagggatggcttgagggctgtcaaaaatgctattgatgatggctgtgtggttccggtgctggtgccgtggaagtggcaatggcagaagccctgaataaatataagctcagtgtaaagggcaaggcacagcttggagtccaagcatttgctgatgtgttgctcgttattcccaaggttcttgcgcagaattctggttttgaccttcaggaaacattagttaaaatttaagcagaacattcagaatcaggtcagctcgtgggtgtggacctgaacacaggtgagcccgtggtagcagcagaagcaggcattatgggataacgattgtgtaaagaaacagcttcttcattcctgcactggttgccaccaacattctcttggttgatgagatcatgcgagctggaatcttctctgaaaggttgaattgaagcttcctctgtatctgagtcttgaagactctgcaaagtgatcctgaagaatacagctgtggaatttttgtccaagcttcaaatgagtttcaagggaattttcccatgtgaaaaaaggagagaacactggcatctgttgaaattcggaagttctgaaattataatcacagtattttttaaaaattgcactgaagtgtacacagataaagcaggtctttcacccagtgaacaggatgttttgctttagcagcagtgacataaaattccatgttaaataagcatatattacctaccttattaaatattccttgaaaaagcagaaaaaaaaaaaaaaaaaa

SEQ ID NO: 7161 - DNA, 2075 bp, Homo Sapiens
  NR_003111
atcagccccggcgctctctcatcccttctctcttccttggtgcttctttttcctgctcggtgagtttgtttgtttgtttgtttttgagacagagtctcactttgcttcccaggctggagtgcagtggtgcgatctcagcttactgcagcctccgcttccggggttcaagcgattctcctgcctcagcctgccaagtagctgggactaccggcgcccaccaccacgcctggctaatttttgaatttttagtagagagtgggtttcactatgttggccaggctggtctggaacgcctgacctcaagtgatccgtccgcctcggccttccaaagttctgggattacaggcgtgagccaccgcgcccggcctgagtgagtcttaatccgtggccatctgcgttcctgcaggcttcatctggccctatggtcccctgcatggctgccctcagatcccttgtgaagcccaagatcgtcaaaaagagaaccaagaaattcatccggcaccagtcagaccgatatgtcaaaatcaagatgagaagaataatgtctggggtgaaggtgaagcacccagcccaagactcagcagccaggaagtggcccagcgctctttataccacgggtgcaggaattcacacagaaaagtggaggccaaggcgtgagaattcctcaatgactgccctctaaaggaagaggaccaggcttcctgtcagagactgaggacccaggaagaaacatgtctcggcccctgtccccctccacaattcagaggccacattctaacaggggaggctgaccaattaaacagataatgacacctcctagagctaagagctctccgactatgaaccagatgcctggagaacacggatgaatggtctgagcatgagcaggggtgggaggcagcgttaagggaggcatcagagtcagaacctagcaaacaagtgtttgtgaagaagaattcatagaaaagggcaatgcgggcatcacatgggctaaggaacagaggggtagcagtagctgttgtgccaagctgcaggtgttatacactaccctctagatctgggtttccttaaaacaccttgagaggacaaccctgcaaagcacggcacagtggccgagagggaaaggagcattcgaggtctcagtcctcgctctgagcctacttctctgcttctgggctccagccatctttgtggaaagggggctgctagtgacaccctctcaagggtctttccagctctaggtcggctgtgctggagtctaggatttgcccactgagaaatctgtttccaagttccttcaacctgatgcatcctgcagcatcacggcagctgttcagagtggtcagaaggcccctgaatgagctcagtagagggaagcctgggaacagggaggcacctgcagctctactcatggcctggccagagctcagcagctcttctctgccatctagtggggatggcataccatcactggggaccaccctgtgcaaactggtgagcctgagtgcctgtcacagagggaaagaaaggggggggatacaggatttagatgaaatagcaactcctaccctattgtcaaaatcatccagctttttcaaaacatcatattgtactgatttttttgtgtttttgacagagtcttgctgtgtcaccaaggctggaatgcagtggcatgatctcggctcactgtagcctctgtctccctggttcaagcaattctgccccagcctcccaagtagctgggactacaggcatgcgccaccacacccagctaagttttgtatttttttagtagagtcagggttttactttggccaggctggtcttaaactcctggcctcaactgatctgcctgtctcggcctcccaaagaactgggattacaggcatgaggcaccgtgcctgtcccatgttgtacttaatagatatttaccatatacaattattttttaatttaaataaatcaatgaacagtgttattttttaaatcttgtggctttaatacaccctttcaattctcagggagtgttttggtgatacaggctggggagttaaataaatgaacgaataaactta

SEQ ID NO: 7162 - DNA, 2939 bp, Homo Sapiens
  NR_003148
caggaagcggatagcgtggagtgacggtgccaccgcggcgcagaggagtctgcaatgccgagtggaggaaggaggaaccggagtgtgagcagtagctgggtgggcagcatggctgggatcaccaccatcgaggcagtgaagcgcaagatccaggttctgcagcaccaggcagatgatgcagaggagtgagctgagcacctccagtgagaagctgagggaaaaaggtgggcctgggaacaggcagaggctgaagtggcctccgtgaacggtaggatccagctggttgaagaggagctggactgtgctcaggagcgcctggccactgccctgcaaaagctggaagaagcgggaaaagctgctgatgagagtgagagagatacaaaggttattgaaatctgggccttaaaagatgaagaagatggaactccaggaaatccaactcaaagaagctaagcacattgcagatgaggcagatgggaagtatgaagaggtggctcgtaagttggtgatcattgaaggagacatgggatgcacagaggaacgagctgagctggcagagtcccgttgctgagagatggatgagcagatcagactgatggaccagaacctgaagtgtctgagtgcagctgaagaaaagtactctcaaaaagaagacaaatgtgaggaagagatgaagattcgtactgataatctcaaggaggcagagacccatgctgagttggctgagagatcagtagccaagctggaaaagacaattgatgacttggaagataaactgaaatgcaccaaagaggaacacctctgtacacaaaggatgctggaccagactttgcttgacctgaatgagatgtagaatgccccagtcccaccctgctgctgctccttcctctgaccctgactctgcctgaggccagcctgcccgaagctgacctttacctgagggctgatctttaacgggaaggctgctttctccttttgccaccccctccttccctgcctctttttcaccaaactgtctctgcctcttcctggagattccagctgggctagaggctgagaacctttgcaaacaacatttaagggaatgtgagcccaatgcataatgtctttaaaaatcatgttgtgaaaaaaaaatacataatcacttctgaaagatgcctttgtcacatcctataatcagctcacatcatttttttctgtacaggtatattttccagttatttacctgttgaccccagaatttgttagattttttaaaaaacaatttctaaatagtttctgtttgaaactagttgcgtccagttcagatcaaggtctgcatgctttctagtctttattatttattggaaaacttcggtacctaatacaaaagtttgattgtttcagtgtgtacctggtaaagaatcagtgaccttttaccttaacatcaaaatgtagtttaaccagttaatgtatttttcagttttctttccttatgtcatctgtgaacatcttgagctgtgagctattaagtgcatgcttccctcaaggccctctggtccattctggactaatgttgaaagatgggatggattggcatggaactgttggggtgatcagacccaacaccgggctgtgggggctaagaagtccagtggagtcaaaggaatgagaaaagacaagttaagaatgcataaggtgggtccagggggccaacgctagtatggaggctgcaatagacctgagctctggaagcccacactattagtgatcaaacaaagcagcaggtggtgaggatgtggggtttgaaaggaagcagtgcatcaagcacatgatctataggtgtgtcaggttaacatttatatggaacatgttctgctacttgagatcatggggaacatattcttctagtttaagatacaatcattttatgagtctgggagtgctagaagcaaagaaccatcaagtctaggcacattccagaggccacgaggggttttatgccctgaaacctggattccatccaagccacaaggggtttgttggggaaagaaagagagatcagactgttactgtgcctatgtggaaagaagaagacataagaaactccattttgttctgtactaagaaaaattcttctgccttgagatgctgttaatctgtaaccctagccccaaccctgtgctcacagaaacgtactgtgttgattcaaggtttaatggatttagggctgtgcaggatgtgctttgtttaaaatgtgtttgcaggcagtatgcttggtaaaagtcatcaccattctccagtctcaaataccaagggacacaatgcactgcagaaggccacagggacctctgccccagaaagcctgggtattgtccaaggtttctgcctgctgagacagcctgagatatggcctcatgggaagggaaagacctgactgtcccccagcccaacacccgtaaagagtctgtgctgaggaggattagtgaaagaggaagacctctttgcagttgagataagaggaaggcatctgtctcctgctcgtcctggcaatggaacgtctcgctgtaaaacctgattgtacattctatttactgagataggagaaaaccgccttatggctggaggtgagacatgctggcggcaatactgctctttactgcactgagatgtttgtgtaaagtcaaacataaacctggcctacatgcacattgaggcacagcacctttccttaaacttatttatgacacagagacctttgcttacgttttcctgctgaccctctccccaccattagcctgtagtcctgccacattcccctcactgagatagtagagagagtgatcaataaatactgagggaactcagagaccagtgccgatgcgggtcctccgtatgctgagcgccggtcctctgggcccagtgttctttctctataaaaaaaaaaaaaaaaaaaaaaa

SEQ ID NO: 7163 - DNA, 1101 bp, Homo Sapiens
  NR_003239
gcagccgcgcccccagccgtatttccgcgggcgctgagcactagagagagcgtcttgtggctgcggcctgcccctcagcctcctccgcgcggttacccctgtacccgccgccatccgtcctggcgctccggatgagtcaatgaggggcagggcccgaggagtggtcttcccaagaacccctggtggcctcccaaggccggtgctgtgtacctcctccccgacaaaaggggaaactgaggccccgaggggagtgggaagagccggctggacgtcaggcccagccgctggtgcagtggtccgtcccctctgccggggtgggcccctcgggtttcgcgtgtcctcgggaaagagactggcgggcctcgtgggctgtgcggctatcctggagacagatgacagctctcccttggatggctttgctggttccgcaccagccagcgcccccatttttcctgcagcaccctgatctgcactccctgaggggctcccactgtccgcggtgtgaggatgtccctggatagtccactgtgtgcagaggcatgggagttgtcatgttgggaacatgctagacctcagtatccttgagggatgctgccttgggtctggaaactgttagaggaaaccccaagaggtgcaggcactgagcctctcaggacaatgacctggggtcccagctcccctggaggggcctcctcatgattgtttgggggttgatcacagaccaagagtgacgagtgatgtcaccctgtgactcatggctggaccttcttgcccctattgtctcagcacaacattattcgacttttccctcagcgtgggtgggcagaggaaaagccctgtggctctggggacttgggatccagagttgaagacccttcagctggctctgccctgccagtgccacagagtgccatggcccaggaagacaggttttcttccatctaggccaggccatccagtggccatcctccgtgtcctcccgcctcctcctggtgtgacttctgaaaaccaagaatttgttcctgttgactttttctgtgctatggaccattgtcctctcacccactcaataaatcttgaaacatgcaaaaaaaaaaaaaa

SEQ ID NO: 7164 - DNA, 2794 bp, Homo Sapiens
  NR_003244
gggagtgttgagggggcctgaagggttccgctcctcccacccagggaaccgccatgccactagtgggctgtcctggagactcggggagaaagcacacaggctgtcgggaaaggtgggtcgcaggcgggcagggcagccctgctgtactgatgggcaggcgctgggtgggtggaaggcaaagccatcaggtcatccccctctctgtccctgcattgggccaaccaggtgtgtcaggaggatatttgaccattcctgagaggcacattctctctctctctctctctctccctctctctctctccctctctctctccctctctccctctctctccctctctctccctctctctccctctccctctctctctccctctccctctctcccccctccctctccctccctctccccctctccctctccctctctccccctccctctctctccctctctctccctctctctccccctctctctccctcctctctctgtcacacacatttgcacatcctgcagtgtgaatggagtatgaatgtgtgtggtaggcgacagctgtgtgtgtacgtccgggtgcgtgtgtgcgtgtgtacatgtgagcgtgtgtgcacgtgagttagagcctgagtgtcccctgcgtgggttagtgtgtgcgcccgcccggtgccctccgtcttgggagtctgggctgctgctccgcgggctctggagccggcgctccccacgagcccggactctccgccgcgcccgggagctgcgcaatcggctgctaagacgccggcgccaccggctgggccctgttctcccctctcttttctacagtcttacccgcagctgacagggttcgaaagagcatgaaacggaggagacgttacagcaacgtgtcagctgaaatgatgggcgtagacgcacgtcagcggcggaaatggtttctatcaaaatgaaagtgtttagagattttcctcaagtttcaaatgaggcgaatcccgttttccgcgatgctgcagcgcgcgggttttaaccgcagggtcacgcggaacgccgcgccgcgcgactgtgcctcggtctctgcgcccggctctccctccggtccgcaagaggaggaaggcccgcggcgtgccgaggtcagcggcgcggagccaccaggcgagacggtcacggacgcctgaaccgaggtcaccgaggccacggggccgggaggccctcagcagagcccgggggctccgcacctcaaggccggccaggaagaaacagcagcaggagcccagggcgccccggggagcccccgacacgcgggccgagcgcccagagcggcccaggccctcgcgaggagaccggcctccccagggcggggcttccgactcgggcgcccgtgagccccggaggcggcgcgaaggggcagagtccgcgtttctaaccagcccccgggtgggcggtggcccgcgcggcacggtgggcgcgagcgccgtgggctggggccggcctgggctttcagggcgagggctttccgcgccggccccagcccacccggccccgctgcgcgcccctcacgctgcagcctgggaacctgggccgggagctgcgggccgctccggggaagcgggcctgacctcccctccccaccgccgcccctgcggtgagatcctgcctgccggggcgcaggggcccgcggttgggctccgggagacggaagaggccccacagctcgggccccacgcagtggacgctgccacttaattttggcgtaattgatgtcaaggcgggtgcccgggcccccagtgaaatgcctcatgaactcgctgcgaggaacggcgctccacgcggtgcacggtggccaatcagagctgccgcttctgatggaggctgagccggctggggaggcgtcttggccaagaaccagccccagcctcgctcagggccccaacccgcagaccatgtaattaagctgcgttctgcagccagggcaagagtctcagctctgaacatcttcccgcacctctgaggagccaggcctggaaaccctctaaaatagatttttctgcctcaagacagaagatgggcgttccaggcagagaagagctgcccagtcacgtgctctgctccacctggtcagagacccttgacctttagaagactggacctgagggcgtggctggtggacctgagggcgtggatggtggacctggccacccagctgtagctttttgggttcctgtggtcccatttcttgggtcaatctcacacctggcagctcccaggaagacacccccaggcccctcacactcctgggggcagctggaattggcttcagggcgggaccaggggccccatgggtgtttggaatccctgatctgggtcaggcaccggcagcaggattccagcctggcctggactctggtgtgtcccgtttgaagaaaccccgccctgtgaaagttcaagtttagcatccaatgacccatttaagaggtttgctgagccacgtcacaggagggtctgggtgcaaacggaggtggcaacacacagagcgagccttgagcacccaggttacccccaggacctccagtctggcttgggggctcctgctgtcctgtggagcagccccctgggatcagggacggggctgagctggagagtgtgcaggattgattaatgatgtctgccacggtcaggccaactgctgtgtttctggggcccacaagctaaaaatggttggaaaaaaatcaaaacattaatatttgtgacatatgagaatgctatgaaagtcaactttgctatccataaataaagttttattgacat

SEQ ID NO: 7165 - DNA, 3615 bp, Homo Sapiens
  NR_003249
gaggccgcgcggggcccgggcttcggccgatcagcccgggaggccccgccgcgcccccttggcccgcgcgcccgtggtcacagtggaagaggcgcccgcgctgcgctgcccggaggagccgtcgcgcgcccgcttcctgttcggctggttcctgccagctcgaggacaaaacacgcgtgcgcgcggcgggcgagcgcgctcgccgcctcagtcgccagcgccgggcgcagtccgcctttttccggagcagactggccgcggtgctagtcggtagcagcggccgccgcagcggctccgcactggcgaaccgagggcagaaaaaggcggggttgacggctttttggtaggagtgggctggaccggacgccagagacaaaggctcccaaggcaagagggactgtggccctgcgtcggctctgctcgggactgctgaccccaggaatttacgccccttcgtttttctcttctgattcttctcttctcccaagcccgcgtcccctcacgcgtggcctctctccttgccgggagggccgcgatggaggtcccgcccaggctttcccatgtgccgccgccattgttcccctccgctcccgctactttagcctcccgcagcctctcccattggcggccgcggccgccgcggcagctagccccgctcctcccttcgctcgctcccagctccgcccggcagggggcgcgccgggcccagcgccacgtcaccgcccagcagccctcccgattggcgggcggggcggctataaagggagggcgcaggcggcgcccggatctcttccgccgccattttaaatccagctccatacaacgctccgccgccgctgctgccgcgacccggactgcgcgccagcacccccctgccgacagctccgtcactatggaggatatgaacgagtacagcaatatagaggaattcgcagagggatccaagatcaacgcgagcaagaatcagcaggatgacggtaaaatgtttattggaggcttgagctgggatacaagcaaaaaagatctgacagagtacttgtctcgatttggggaagttgtagactgcacaattaaaacagatccagtcactgggagatcaagaggatttggatttgtgcttttcaaagatgctgctagtgttgataaggttttggaactgaaagaacacaaactggatggcaaattgatagatcccaaaagggccaaagctttaaaagggaaagaacctcccaaaaaggtttttgtgggtggattgagcccggatacttctgaagaacaaattaaagaatattttggagcctttggagagattgaaaatattgaacttcccatggatacaaaaacaaatgaaagaagaggattttgttttatcacatatactgatgaagagccagtaaaaaaattgttagaaagcagataccatcaaattggttctgggaagtgtgaaatcaaagttgcacaacccaaagaggtatataggcagcaacagcaacaacaaaaaggtggaagaggtgctgcagctggtggacgaggtggtacgaggggtcgtggccgaggtcagggccaaaactggaaccaaggatttaataactattatgatcaaggatatggaaattacaatagtgcctatggtggtgatcaaaactatagtggctatggcggatatgattatactgggtataactatgggaactatggatatggacagggatatgcagactacagtggccaacagagcacttatggcaaggcatctcgagggggtggcaatcaccaaaacaattaccagccatactaaaggagaacattggagaaaacagcgggaacttcattgcaggccgtgtgtcaccctgaccacgtctatctctgggggtcgcacgttgcgggcagagcgcaaggcatacaccagaaaacgctgtcctgtggaggagatgttaaagtaacccatcttgcaggacgacattgaagattggtcttctgttgatctaagatgattattttgtaaaagactttctagtgtacaagacaccattgtgtccaactgtatatagctgccaattagttttctttgtttttactttgtcctttgctatctgtgttatgactcaatgtggatttgtttatacacattttatttgtatcatttcatgttaaacctcaaataaatgcttccttatgtgattgcttttctgcgtcaggtactacatagctctgtaaaaaatgtaatttaaaataagcaataattaaggcacagttgattttgtagagtattggtccatacagagaaactgtggtcctttataaatagccagccagcgtcaccctcttctccaatttgtaggtgtattttatgctcttaaggcttcatcttctccctgtaactgagatttctaccacacctttgaacaatgttctttcccttctggttatctgaagactgtcctgaaaggaagacataagtgttgtgattagtagaagctttctagtagaccatatttcttctggattgtaataaaattgttagtagctccttttactttgttcctgtctctggaaagccatttttgaattgctgattactttggctttaatcagtggtcacctagaaaaagctttgtaatcataacacaatgagtaattcttgataaaagttcagatacaaaaggagcactgtaaaactggtaggagctatggtttaagagcattggaagtagttacaactcaaggattttggtagaaaggtatgagtttggtcgaaaaattaaaatagtggcaaaataagatttagttgtgttttctcagagccgccacaagattgaacaaaatgttttctgtttgggcatcctgaggaagttgtattagctgttaatgctctgtgagtttagaaaaagtcttgatagtaaatctagtttttgacacagtgcatgaactaagtagttaaatatttacatattcagaaaggaatagtggaaaaggtatcttggttatgacaaagtcattacaaatgtgactaagtcattacaaatgtgactgagtcattacagtggaccctctgggtgcattgaaaagaatccgttttatatccaggtttcagaggacctggaataataaaaagctttggattttgcattcagtgtagttggattttgggaccttggcctcagtgttatttactgggattggcatacgtgttcacaggcagagtagttgatctcacacaacgggtgatctcacaaaactggtaagtttcttatgctcatgagccctccctttttttttttaatttggtgcctgcaactttcttaacaatgattctacttcctgggctatcacattataatgctcttggcctcttttttgctgctgttttgctattcttaaacttaggccaagtaccaatgttggctgttagaagggattctgttcattcaacatgcaactttagggaatggaagtaagttcatttttaagttgtgttgtcagtaggtgcggtgtctagggtagtgaatcctgtaagttcaaatttatgattaggtgacgagttgacattgagattgtccttttccctgatcaaaaaatgaataaagcctttttaaacaaaatccaaacttttaa

SEQ ID NO: 7166 - DNA, 1153 bp, Homo Sapiens
  NR_003263
caaagctcgaccccggtgtggtgcgcaggcgtagtctgcgcggggactggcgggactgcgcggaggcgactacaggcatggcggtctgggtcctgtcgcgcctgctgagcgctccgcgcctggcgctggccaaggcggtcctgaggcacgtgaatggccaggatcagattgtgcccggcctgtacgcctgtggggaggccgcctgtgcctcggtacatggtgccaatcggctcggggcaaactcgctcttggacttggttgtctttggtcaggcatgtgccctgagcatcgaagagtcatgcaggcctggagataaagtccctccaattaaaccaaacgctggggaagaatctgtcatgaatcttgacaaattgagatttgctgatggaagcataagaacatgagaactgcgactcagcatgcagaagtgccgctgggttagggtctccacaaccgagctggtctcagcaagtggcgcccacacatgggggctcgaatccaggtcgaagggtcaccggagcgacagaaaacttggaactaagctggaggacaccgagtactcttatgcagtccccatggaatggtctggaacacggacctggtggagaccctggagctgcagaacctgatgctgtgtgcgctgcagaccatctacggagcagaggcgcggaaggagtcacggggcacgcacgccagggaaggctacaaggtgcagattgatgagtacgattactccaagcccatccaggggcaacagaagaagccctttgaggagcactggaggaagcacaccctgtcctatgtggacgttggcactgggaagacccgtaatcgacaaaactttgaacgaggctgactgtgccaccgtccccccagccattcgctcctactgatgagacaagatgcggtgatgacagaatcagcttttgtaattatgtataatagctcatgcatgtgtccatgtcataactgtcttcatacgcttctgcactccggggaagaaggagtacattgaagggagattggcacccaggctgggagcttgccaggaacccagtggccagggagcgtggcacttacctttgtcccttgcttcattcttgtgagatgataaaactgggcacagctcttaaataaaatataaatgaacaaa

SEQ ID NO: 7167 - DNA, 2590 bp, Homo Sapiens
  NR_003264
tgcgcggcggcgactacagacgtgtcgggggtccggggcctgtcgcggttgccaagcgctcggcgcctggcgctggcgctggccaaggcgtggccaacagtgttgcaaacaggaacccgaggtgttcacttcactgttgaaggaacgagagggcatctgctaaagtttcagattccatttctgctcagtatccagtagtggatcatgaatttgatgcagtggtggtaggcgctggaggggccggctttgcgagctgcatttggcctttccgaggcagagtttgatacagcatgtgttaccaagctgtttcctaccaggtcacacactgttgcagcgcaggttggaatcaatgctgctctggggaacatggaggaggacaactggaggtggcatttctatgacaccgtgaagggctccgactggctgggggaccaggatgccatccactacgtgacggagcaggcccccactgccatggtcgcggtgatgggcgggaggctctgggtgctctggtggtctgtttctagtacaagagtcctggaaaaaatgtaagcagttgaggcagatgtggcagccgaaagaatggtagaaaattatggcatgccgtttagcagaactgaagatgggaagatttatcagcgtgcatttggcggacacagcctcaagtttggaaagggcgggcaggcccatgggtgctgctgtgtggctgatcggaccggccactcaatattgcacaccttatacgggaggtctctgcgatatgataccagctgttttgtggagtattttgccttggatctcctgatggagaatggggagtgccgtggtgtcttcgcactgtgcatacaggacgggtccatccatcgcataagagcaaagaatactattgttgccacagggctactggcgcaactacttgagctgcacgtctgcccacaccagcaccagcgacggcacggccatgatcaccagggcaggccttccttgccaggacctcgagtttgttcagttccaccccacaggcacatatggtgctggttgtctcattacggaaggatgtcgtggagagggaggcattctcattaacagtcaaggcgaaaggtttatggagcgatacgcccccatcgcgaaggacctggcgtctagagatgtggtgtctcggtggatgactctggagatccgcgaaggaagaggctgtggccctgagaaagatcacgtctacctgcagctgcaccacctacctccagagcagctggccatgcccttgcccggcatttcagagacagccatgatcttcgctggtgtggacgtcacgaaggagccgatccctgtcctccccaccgtgcattataacatggacggcattcccaccagctacgaggggcaggtcctgaggcacgggaatggccaggatcagattgtgcccggcctgtacgcctgtggggaggccgcctgtgcctctgcacatggtgtcaaccgcctcggggcaaactcgctattggacctggttgtctggtcaggcatgtgccctgagcatcgcagagtcgtgcaggcctggagataaagtccctccaattaaaccaaatgctggggaagaatctgtcacgaatgttgacaaattgagatttgctgatggaagaagcataagaacatcggaactgcgactcagcatgcagaagggctgctggctcgtgtcacgttcaccaccagaccccacatcaggagtcccgccaggggtgtggggaggcagcgctgcctggttggccgtggagccgtatggaacatggtgcctcacaggcagtctgcttggcgtcctggatcctggctgtatcccgctggaaaggattcaacgcaaaatcatgctgccgtgttccgtgtgggaagcttgttgcaagaaggttgtgggaaaatcagcaagctctatggagacctgaagcatctgaagacgtttgaccggggaatggtctggaacacggacctggtggagaccctggagctgcagaacctgatgctatgtgcgctgcagaccgtcaatggagcagaggcggggaaggagtcacggggcgcgcacgccggggaagactacaaggtgcggattgatgagtacgatcactccaagcccatccaggggcaacagaagaagccctttgaggagcactggaggaagcacaccctgtcctatgtggacgtcagcactgggaaggtcactgtggaatatagacccataatcgacaaaactttgaatgaggctgactgtgccactgtccccccagccattcactcctactgatgagacaagatgcggtgatgacagaatcagctttttgcacagccagagaacaacacatcacacacaagaaacagttgtgctcatgtgatgggggcctcagcactaggaaggagtggactgttggcgcacgcagcagcttgaataaatctgaaagtcactacgctgcgtaagagaagccaaataaagcgcatgctgtgtacaaaaaaaaaaaaaaaaaaaaaaaaaaaaaaaaaaaaaaaaaaaaaaaaaaaaaaaaaaaaaaaaaaaaaaaaaaaaaaaaaaaaaaaaaaaaaaaaaaaa

SEQ ID NO: 7168 - DNA, 332 bp, Homo Sapiens
  NR_003273
gatgtcgttggagagcaagcaattcctgacggagctgaccagactctaccagaagtgccggacgttgggcagcgtctatatcaccttgaagaagtatgatggtcgaaccaaacccattccaaagaaaggttctgtggagggctttgagccctcagacaacaagtgtctgttaagagctatcgatgggaaaaagaagatgagcactgtggtgaactccaaggaagtgagtaagtttcagatggcttattcaaacctactgagagctaacatggacgggctgagaagagggacaaaaagagcaaaaggaaaaagaccaaagcagcagcacagta

SEQ ID NO: 7169 - DNA, 1628 bp, Homo Sapiens
  NR_003370
tcaaaaaaaaaaaaaaatccagccacgtagagatttgggaaaagagtatttccaatagagtgaacagatttcaaatatgcgtgcattagagaatgattttttcaattctcccccaagaaaaactgttcggtttggtggaactgtgacagaagtcttgctgaagtacaaaaagggtgaaacaaatgactttgagttgttgaagaaccagctgttagatccagacataaaggatgaccagatcatcaactggctgctagaattccgttcttctgtcatgtacttgacaaaagactttgagcaacttatcagtattatattgagattgccttggttgaatagaagtcaaacagtagtggaagagtatttggcttttcttggtaatcttgtatcagcatagactgttttcctcagaccgtgtctcagcatgattgcttcccattttgtgcctccctgagtgatcattaaggaaggcgatgtagatgtttcagattctgatgatgaagatgatagaatgttacgttcataacttactaaggattagtgtatattttccaaccttgaggcatgaaattctggagcttattattgaaaaactactcaagctggatgtgaatgcatcccggcagggtattgaagatgctgaagaaacagcaaatcaaacttgtggtgggacagattccacggaaggattgtttaatatgggattcgcagaggcatttttggaacatctttggaaaaacttgcaggatccaagtaatcctgccatcatcaggcaggctgctggaaattatattggaagctttttggcaagagctaaatttatttctcttattactgtaaaaccatgcctagatcttttggttaactggctgcacatataccttaataaccaggattcgggaacaaaggcattctgcgatgttgctctccatggaccattttactcagcctgccaagctgtgttctacacctttgtttttagacacaagcagcttttgagcggaaacctgaaagaaggtttgcagtatcctcagagtctgaattttgagcggatagtgatgagccagctaaatcccctgaagatttgcctgccctcagtggttaacttttttgctgcaatcacaaagatgaagacttgtggatatggatggtggtgatggttgcacaacaatatcaatttattttataccactgaaccgtgcacttcaaaatggttaagatggtaagttttatgttgtgtattttaccataataaaaaaaattgtagagggaaaaacagtctgcctccacttttgatatgggactgctaacatcttccaccctccctctccccctctgccccacatctgggcaagctaagaaagcctgctgctctctcctctggcaccagctggaaattcatacccaacaagccctagccctcccaccagacccacatttcatccccatccccatcgcatccccatccccatccccatccctaaccaccataaatgctaagggagtttccttgcctggttttctgaaaccatttttggacctgcttgggaatctgccctgctctctcagaaagcttcattatatgagcaataaaccttttcctaccctcaaaaaaaaaaaaaaaaaaa

SEQ ID NO: 7170 - DNA, 10193 bp, Homo Sapiens
  NR_003491
cagctacaaagacgacgccggctgcgctcgcgggaccagagggagggaggctgcggacgagtgcggggaggagtttgagatgggaggcgcttgcaggggctcccccagttctgcgctgtgagccggggcacaaagagccctctgcactagcgccgcaggaccgcggacccgagttggaggcatctgtccacccatgtggttccagacacgttcatgtggccaccatgaccccgtcggcatcacaggggtaaccaaggtccacagaacgaggggaaagggtcactgtggatcaagccaggctcctctgagcagtccagggtctatttacagagagcagcaagttcctgggacagaggagacagaagggaatttccaggttcttcaggacgttcacaaccacactgagaagcatctttgcagataagtatttaaacttaccagcccatagcctaccagcctgccctcttctggtctgtgcaggaaagtgtagtatcctagaatgccaaagtgggaggggaaatgggtgatgtagctcattctcttttctacctctatggaagaaagaaagagcctgtccccattttgtggggtcccagaaagggtgattttcacacttcacatttggcgttagggctagtatttcacaaacattaccgtctggaacttttgaaggctgagttaaatgacttcatcttgtgtacttgtagaactgctattagaaggaggctggggactccctgatgatgtgaaccagcccttctcttctcagtttcagcactttgtgatcatatttataaaccttggacagggctccttggccttagagttaagtgaagagttaacactgtgactttagatgcatttttctcagtgtaagtgtctgagctcatctccagttctggactcgtgcccccactcccgggtgctgacagcaagctctgaagatatgctgagagagctccctgactctcctgactcaggtctgccagttgatgaagacagcacagttgttaccaaaaacaaaacctggcagatggtcctaggtcaggattagtggtcattctctggtcttctccagactggtgacacagggtggtcttaaaagagtcctagtccagcctctggctccccgaatttcctctggtgcatggggcatcaggaaagggcaggggagaaggagggggagcagaaaaataactgaggctgggcagaagggtcccttccatttcccatccattgcttcaaacaatgggtgattaccgtgcaccttgagtgaatgtcaaggcaggaagggttccagggccacccagtgtggcaggagcagagctgggatcagaattctggattcctgactctccgttcagctgctattcagctatcaccaagctgctgagtttgtcctactttctcctgggtcacattctgctgttgttgggaaacagggagtgagtgaagggaacctgggaacccttctcccctcaccttttaaggatgttctggggtggaataaagagaggtggagggtggggtgcctggcccagcctccctggctcctggtccttctttcttcagcagggagttctggcaaggcctgggcctggggagggggcctgggtgcagttttctcctgcggtgtggttggctcttttgtcttccaggatgggcctgtggggtctgtgtggggaaggaaggagctgggagcctgggctgcctgtgtgtcggctggatgctgccagcaccggcatggaccaagcaacttctctgagccagatgctggggacgcagaggtgaacccagagacatgatcccatctgctcagatcttcatgtcagaacacgctttattacagtctcggcaagggggtggctccatctgggccgcatctccaggactcctggcctggacttctctttggacctcgggtgaccttggattctggccacagtgacttagcggtcagactccggtggttttctagcccgctgggtgactccctgaagatctcatcctcttcacacctgttgggatggagcctcccatggataggaactcttcctggttgatgctcagcagatgactgatctggctctggaggacagctccaggggtatgagggaggcctggcagcccactactccctcctcacctgctcgggccctgcctgctgggccctattgtctgggtctgggggccctttcctgccccatgtgaacttgattcctcctcgcgtttctgccggtgaccagacagagcctggcctgggccaagtccccactgaccacactttccccaaggctgggtctcaaaggaccctacaggatggggacaggaacaaggatgggagtcggggaggggctgtcaggcagagggcagatgcagctcctcgggtgccgctggctggagtcctttgtctccatttgctcagtgcgtaattgtcattttgtgggggacttccttggtggggcttttccatgcttttcctctccctgatggttacaaagaggagacagtcaggatctgggaggagctggagccttccccctgtgctgttgaactctgggaggggcagccagaggggctgagagtgcaccatcctgaaaagagagggtctttaagagataagatttaggctagggaaattcactagaaagagacaggtggccctgggttttttttcctgccatccaaagggaaccagtcttacccaaaggcttaaggggtcaccttagcccagtctcaggacactcttctccaatcagatcgctgcttctagttgcactgctcctggattctgttcttggggaacagaaggtggcaggacaggccccacaatctgcaattccagctccctccagaggagacagtcccagcgtttgcaagagagcagcttgtggcctcccttaggcaagtttaaaagccagatgtcctttttcccagaatgcggagtggtgtgtactattcatcagcttgggctgccacagcaccatgccagactggatggcttaaacatcaggaatttattttctgccagttctggaggctggaaagtccagatcaaggtgttaagacttggtttctggtgaggcctctctccttggcttgcaggtggcaccttctcactatgtcctcacatggccttttctctgtggagagggacagagagcatgagcaggctctggtgtctcctcctcttcttataaagacactaatatcaccatattagggcttaaacctatgacctcatttaaccttaaccccttaaaggtcccatctccaaaaacagtcacatagcaggctactgcttcaacatatgcatttgggggaggggacaccattcagttcttaacagggtggtcaccgcaaacatggaaagtcagagccttctccccttcagaattcccgcccccacccagggatggggaggaggagcagagaggtatgggaagcagacacggagagtggcaggtaccatgctggggtggctcaggagtgcttcggaggacatatggaactggcagggctcagtgcagggaggcggaggccctgggagagccgtgtcctgagaagggcctgggctacaaccctgggcaagttacttcacctctgagcctccgatgctctgtgaaatggaaggaatgtgcttgcctgtcaggtgcagggagaattcagtgagattgtgtgcctagcacagtgcctgactcccagtaggtgctcagcaaatgctcccatccatctgggagtatagacttagggtttatctatttttttttttttttggctctctggactttaaaactcagcatcttctgaaccagaggcatttctgattagcccttccctacctattttcctagtatcactctttaatcagcttggggaggtggcagcatttcatggcctccgtagtaactcacaatgcttcctggggtatttaaattctactctctcatcagcactgagcacctactttgggccctttcccgtgctagccatttgggggaaatataggtgaagagtggctggggtttgaacctttaggatttcacagccatgctggatgggataaaaccagctcacatggagaatcagagaatgggacagtgccacaaaacagtctactgaggcacaagttctgagtgcctgggaagtggtagagagaccccagagagggctgctgcagtctggaacagcttcctagcaagctgtaccaaacagggccttgaaggatgagaaagatctggctgagatgatacccgaccctctagggaaattcttaaagtaacttctaggaaatgtcattgctccttaaaaaaaaaaaaaaaaaaaaaaaagcaggttctaattcaaattccgctgcactactgaagtagtgcaggacttatcagaacctttaaaatgctaatggcaatttcaaatactcagggacagggcataggatgaagtgttccttgacttttatggccgtagaatctttttctcatggaacatcgtttagaactgtgggagatgctaggctggggtttctatgggaaaagtacagcagtgatagaagatggcataattagggtacacttaggtgctttgtagcattggctgaaaaggaagcagaccgggtgggcgtgggggagtctcaacttggttccaggagccaggccagcttgatgcgttttttttttttctaatggtgggagggcaggccaatagttggagaaactagaggcctgacagtcggtgatggaagagatgtctactaagcacggttgtcagatcttttgcggagagatgcgggtgtgcgtgtgtctgtcagagtgtaacaggatccagccctctgggaaggggctgaccagaaccaggcagggggtttctgtctaggacaagtagggtccattttcaggggagctgaaatatttgcagggggtgctctgagacccacagccaataaatagggaagcaacatgcttttgggcagggtccatgtggttagggttgattttgatggggctggggggcttagagttagaccccctgccctggtcaggccccactccctggctggtgggggcgggaggcctctgaagctgcagctggaggggccggggcagtgttgcatggtgtgattaacctactaacccagggctcagccgggacgctgtggcgtgtgacgaggtgcctggccttctgccaaccaactaacccactaaccaggcccgagcatgccctactaaccacccccccgcagccagatcctactaactgtgcagctcatgggcctttcaaggggctgggatatgggggcagccaaggctccagaaggctctgcctatgggctgggatctttgtgcagacccacgttccaggacagagaatgcaaataagactcaccaactctgccacttcctgttgagtgagtttgagtaagtcacctcacttctctcaacctcagtttcctcagtggtagaatgcgagttctgataccttacaggttgcagtgaggattcccgtcaatataagggtctcagcacatggcagacacctaaaaaaaaaaaaagtatgaggatggaggaaggcccctcaaacctggttgaacacgtctgctgcctaggccctggcctctctgggtgttctgcacacagatccttctgcctggggcaagacacttggctttgaatccatgtcacttccccacattcttcctccgtctcagctttcttttctgtaggcagctcttttgttcgattactaacccgtctaacccctggggtgcctcaactgcaccccgatcatcccttaacaaactaacggacctgcgtgcgttcttccttttctcttagcgactcctgtgtgtgtctgctgaggtgccctgtccgctggtgctgtgctctgacttactaacccagcccctactaaccctgttttctcttcttactaaccccagccctgccgagctctgggctccccccgggggctggtccccctccttttggcaagcagatgacctggggctactggccctgtagacagatgtcccactttgctgccccatattggctgtaagatcagagtccactgggccaggtctaaggcaggggatggccctattaacaagactcagaggaggaagaggtggtcctgtggatgtgggaggctggactctgagtatgacatctctcctatgtgcagaagtctggttgccactgggagtaggtgggaccagggaaatctctgggacgtgagtgtggaggcctgttggtctagactctagactgtggagctctgagcttttgtgtcctctggaaggaagctggggaagaatcctctccattgttaagtgacggggatagaagctgtcctgcacaggaagtcacgaggggggcgtatcccacgaggaaggcaggagggggcgtgcccctcaccggaaattagcagaggggcgtgtcccacaccggaagtcagaaagcggagcctttcttacaccggaagtcaatgaagcgggtctttcctacgctaaaaaccactgagtggagtatttagtacacaggaagtcggccagagaaacatttctcatatttgaaggccggaaagagggacatttctgacaccggaagtcagtgagaggactctttcccacacaggaagtcagctagagagccgtctcccctctctggagccgagagaggccggtttcccccaccgtaagtagacgtggggccgtgaccggaagtccttgggaaagatccgtcccattcccggaagctagagggcgttagttgtcgggttgaaaaggggtgtggggaggggaagcagctttaccccgggctcggagtttgcaggagagagaagtggggagcaagaagtgaacctcaggggctcacagggttcccgcagatgctcaggccggccaggaatgcatctctggctctctgttcccacggacgtcactgcctcagccagcctcccccagagcccgccagccgctaagccggggccacacctgggggtgatttcatgcctcacctccagtaggcaccttggtttctttgggctaatctctggctcccttgcgctaactcttgctctcacccagctaatccctgcctcaccctgactgccccaggggctgaccactaacaaccaacctggccctgtctgggggttccaggctcctggcctggccctgaccggttcttaattaacctttccttcaccttgactaactcctgccttcctggtctgttcctttcagcagaaactaatggtttgtggatttttttctgactaacaacaggtctaacattcctcgttactgttaacagcttggatgtcggcatggctgggaaggggctaacacagctttgaacttggctaacacaggtttgaacttggctaacacaggtttgaacttgactaacacagggaaaagcatagctaacaattttgggcgtggtggctgctctgagtcagaacaatcagaagtcggtaaagatggtagttttctaaaggaggtgccagggctctggtgtggaccaggcctgatggagcagtggtacccaccaaggtggggtcagaagtatagccagtcttgcaaggttttggccattgggcatatcttcactcctcatagtctgcatttggtttcagttcttaaaaaaatatagccttatagctacagtagtttgcacaagtagatgcagctcttataaaccttaaaatacctgtctggtgtctacagagcatatgccattttgtatagagtcacccttccccaggccagggcctagagtcttcattttggggactttgtgttttggaagttctaggacataaagctttagatcagagtattcagaagggttataactccgtcagtcatttacatgttagtagtataaattatctgagcttcctgttctaacttttagctcttctagcataaactcttctgtgcaatttagctgcaccgaggaaacgggagtttttctggaagggacttttgatctctttagactgagggaacgtcctttgggagtagaggggcagggagcatacgcaagggattccaggtgcaggtaaaaggtggcactagttcaaggttttgctgactcagtctggtagtcagagtctgcaggagaagacagttcaaggcagggcctggaggattggatcagtttagggacaggtcaaaggctggcttacagaccttagaggcaggttgcttgggtcgttgaatgctagtctggtgctgagagcccttttctctggcaactgtggactcagagctaaccaattgtagttggcagtgggggtgaagggtgatccagaggcctgagctgcagagggcacaagagagaaaagatgtcttagaaagagctttgagaacatgccttggctgctggcagggaccttggatggggtagtctacacccggaagtgcctgcctgccatcctctagtggctgccttgctccatttcactcaaagcaggaagctcacacctcctattcctgaaactcctctttgtttaactgcaaagacttgatgctgctaaggatctactatgtgccaggcactgctctgggcgctgggacctgcacctgggctttttcgtcatggtgcttttatagcctagtgggagagttggtgaagtagatagtgattcagtgagatgggtgttatgattggtcaggggtctgtgggagcaccaaggagacagacaagattgatgtgcacctactctgtgccaggcgtgtgccaggcattggggatgtagtggtagttaaacaccatttggtcttcaggagctttaattctagtgtgttgggtgcaggggggtggaatggggacagagagacacctaatccaccctgtggtggctttctggagagggaggcatctaagctgagctgtggctgggtggagtgtgggtggggatgagttccgggcagcgagagtggtggacaccagtttctggggatcagagaggatccaaagaggttctggaaggttcatgtggaatgtagcaagagataggagacatggacatggtgccgggtctggttgccaagaagtttagattttatccttaggccttggggagcgacggatatgatctgagaaagggagttagtggatttgagttttaggctggccatttggcttttccagcccaggtggaactcagaggagtttgcaatggcctctggccacattttagacaactgagcagaactttttgaaactaggaagaccctttggtccatcttttgataaacagaatccatacatgtctaccccagttggaagtatctctgcaatgactggaaagtaaagaggaccaaggtgaaaataaaggctcggaaggggagcaatcttgaaaacatgtcatcccatggtggtgggaagtccctggagaagatcaggggaaacacagtcataggctgcaagtctataagataattccattggggagggagcccatttgtcatgcatggctgcaaggggcagatacaagtgtggagtaagcttgcaagagctgatcctggtcccagagagggaaaaatatgccttggtgggtaatgaaccttttgttcccagaggcagaaggattgggactaggccaacatagagattggcgatggttgtgagattctaagagtgtgtgtgcatcttgacaatattagaggaggctgagcccaagcaggcacattctcttcgacccctccctcattcagtctgctttggagtctactgaacatcaagcttgctatgagcaggatcttagagctgaggaattggcctcccaatccgaacaggtgttataatcctttcttaataggttgtgctgtggacccaatgtgagggctgtgctggtgtaaatggtgacatgttgagctggggggatgctttcggggtggggggactggttccattccatcaaaggccctcttgagagtctatccagggacccattgttttactttaacagaccagaaaagatgtttgttttccatgtcattacccccaggggataccgaatgtgtgggtagaaatttctctgtagattaaaaatcagatttttacatggattcaacaaaggagcgtcacttggatttttgttttcatccatgaatgtagctgcttctgtgtaaaatgccattttgctattaaaaatcaattcacgctggaaaaaaaaaaaaa

SEQ ID NO: 7171 - DNA, 3886 bp, Homo Sapiens
  NR_003501
gggagaagcccacgtgtgctattccatcccacatggcggcgctcctgaggagactgctgcagcgcgagaggccttcggcggcctctggccgccccgtaggacggcgcgaggccaacctgggcactgatgccggggttgcggtgcgagtgcggttcgctcccagccccacaggcttcttgcacctgggtggcctccgcactgccttgtacaactacatctttgctaagaagtaccaggggagcttcatcctgaggctagaggacacagatcagactcgcgttgtgcctggggcagcggagaatattgaggacatgctggagtgggcaggcatcccgcctgatgagagcccccgccggggcggtcctgctgggccctaccagcaatctcagcggttggagctgtatgcccaggccacagaagcgctgctgaagaccggagctgcttacccctgtttctgctcaccccagcggctggagctcctgaagaaggaggccttgcggaaccaccagacgccccggtatgacaatcggtgcaggaacatgagccaggagcaggtggcccagaagctggccaaggaccccaagcctgcgatccgcttccgcctggagcaggtggtgccagccttccaggacctggtctatggctggaataggcatgaagtggccagcgtggagggagacccagtcatcatgaagagcgacggcttccccacataccacctggcctgcgtggtggacgaccaccacatgggcatcagccacgtgctgcgaggctctgagtggctcgtctccactgccaagcacctgctcctctaccaggccctgggctggcagccaccccacttcgcccacctgcccctgctcctcaacagggatggcagcaagctctccaagaggcaaggggacgttttcctggagcactttgctgctgatggcttcctgcccgattccttgttggacatcatcaccaactgtggctcaggttttgcagagaaccaaatgggcaggaccctgccggagctgatcacacagttcaacctgacacaggtcacctgtcactcagccctgctggacctggagaagctcccagaattcaacagactgcacctccagcggctggtgagcaatgagagccagaggcgccagctggtggggaagctgcaggtccttgtggaggaggcctttggttgccagctgcaaaacagggatgtcctcaacccagtctacgtggagaggatcctcctgctgagacagggtcacatttgccgcctgcaggacttggtgtccccagtatactcttacctgtggactcgccctgcagtaggtcgagcacagctggacgccatctcggagaaggtggatgtgattgccaagcgtgtgctggggcttctagaaagatctagtatgagcttaactcaggatatgctgaatggagaactgaagaagctatcagaaggtctggaaggcaccaagtacagtaatgtgatgaaactccttcggatggccctcagtggacagcagcaaggacctcctgtagctgagatgatgttggccttgggaccaaaggaagtacgggaacggatccagaaggtggtttccagctagggagaggatgtttcgggcagtggagatcgccctaagaacctgtgagcttagaaacagctttcagagaccagaaggaggcctggggcccgtcgggaagtttgctgaaggaactaagagtggaaacaatctctgactgcacacaagtgcatttgtgatccaccacaggcacgtttttgtcaattggctggggaagcccaacccatctaacctcctggactctggaaaggcattctccgggtctggtttctcacacattacacagcagaggtttggagttagttcacagaaaagttaacatcccggaacagtgcagaaggcttgggtttcagtttgctagggcccccataacaaaatgccacagaaccaggtggtttaaacaacagagatttattttctcacatttggaggctagaagttcaagatcaaggtgtcagcaggcctggtttttcctagaggcctcttttgttggcttgcagacagctgtcttctcactgtgtccttgtgcggtcttccctccatgcacacacatctctaagtttcattatgtgcccaacgttcctcttctaagaacaccagttggactggattttaactttaaccagcctcatttaagttaatcacctctttaaatgctcaatctccaagtacagtctcattctgaggttccaggggtttctcaacgtaagaatttagggggacagaattcagcccgtagcagctgggcagcaggactcatgggtcccagttctcaggccccaaggactcagagcagcaaaggatacgtgacacaagcagggctgaactggacaccagactttctttggggttgtaaaaggagaagtgtgactccactgccaaggtcttccagacctggtccttggactggagaccttcacccttcctattttgtggctttctcttcaaatccacctcgtccttcctccatgacttataagtcatcatctctgctggtttctgaaatgagatatgcttcttggggtcttcagtgaagaggaatagcaagtgaaaggaggatggtggcagggtacatgaacccctaccaggcttctaggcttcccctgcatggcagccagcctctaagttggcccccaaccatccctgccttcttctattcacacccttgtgtggttccttcccacattgaataggcctgacttgtgtaaccactacactattgaagaaatgagagtttgacttctgagggtaagtcataaaatacatcgtggcttctgtcttgttttctttgatcgcttactttgggggaagccagcttccaggtcatgaaaatactcaagcagccttatggagtgctccacatgacaagggatcgaggcctcccaccaatagccatgggagtgtgcaatcttgaaagctggtccttcaattccagccaagcattcacatgaccgcaatcctagctgatctcgcttgtgacctctatgggagaccctaagccagaaccactcagagaagctgctccggaacgtcagacacacatgaactgtgagatagtaaacgtttattgtttaaagctacttggtttggggataatttgcgtttcagcagtagacaatatatttattttgtccaggggagtggaaaggcgattacagagtttgttgagccccatagagtcctagtctttgcttaaagaaatataccagttctttctaatacagaatccattaagttcgttggttgcaaacaatagaaaccaactctgcctcacttatgtttattggaggccataagagagccacagcatctaccaaaaagccaaaaaaaaaacaggttttggaaaagacaggaactagctacaggagctaatggccaatcttgtctgagttctttgatggcgacacatgaactacagccgttttgttgttgttaatttctccgtgttttcccctcagttttggatgactctgctcaaggttcagattctgaggagcaagtatctgttgggctatctgaggtcctgctaccattccttggccagtaataggtagtttcacagggattatatgcaatggaggaaaagttgttctcaaggaaaactagggagctttctccagaagatgatgtaatggcagaaacaacaggtggttgaccacagaaggggacaataataatacttgtaatttattgtgcgcttatatgagcctcaccctctcccaggtgtcagataatgctcgtaaatgccttagtccatcatctcagtaaattttttttataacactatgaaaaaaaaaaaaaaaaaa

SEQ ID NO: 7172 - DNA, 1200 bp, Homo Sapiens
  NR_003504
gaggagtgcgggagcgcgccagagactggcgggcagctccgcccgcggccgggatgcactaggcaaagccagctgggctcctgagtccggtgggtacttggagaacttattacgtctagctggaggattgtaaatgcaccaatcagcatgctgtgtctagctcaagattttctccatccccttattttgggccagtggctgtcattacatatgagatgagtctcttgaagactacagatgagagcagtcatgatggcctgcactccacacaatgcaacagagtgaaggagcaggttctggttctttggtgtagtcctgaagcttcctaagaaagttcacatcaggtgatggataggagcaaccctgtaaaaccagccttagactatttttcaaacaggctggtgaattaccagatctccgtcaagtgcagtaaccagttcaagttggaagtgtgtcttttgaatgcagaaaacaaagtcgtggacaaccaggctgggacccagggccagctgaaggtgctgggtgccaacctctggtggccgtacctgatgcacgaacaccccgcctacctgtactcgtgggaggatggtgattgctcacaccaaagccttggacccctcccagcctgtgacctttgtgaccaactccacctacgcagcagacaagggggctctgtatgtggatgtgatccgtgtgaacagctactactcttggtatcgcaactacgggcacctggagttgattcagctgcagctgcccgcccagtttgagaattggtgtaagacatcacaatcccattattcagagcgcgtatggagtggaaacgcttatagggtttcaccaggatccacctctgatgttcagtgaagagtaccagaaaagtctgctagagcagtaccatctgggtctggatcaaaaacgcagaaaatacgtggttggagagctcatctggaattttgccgatttcatgactaaccagtttctgcaggctggaaatccaagatgaagtcacctatagttcagtgtctgcgtctaagagagcactttgttgctgcacccgccatggggaagaaatactgtatcttctcatgaaggaaggaaccgaaggtttacaagtattgtggctgaaggctgtgtctattcctgcttcctccacctcaccttgcaaaagtgtttatccaaataaatccctcacacatc

SEQ ID NO: 7173 - DNA, 2360 bp, Homo Sapiens
  NR_003563
gttcatgcgggagatggcaggggctggcacatgacagtggagcagaaatttggcctgttttctgctgagataaaggaagcagaccccctggctgcctcggaagcaagtcaacccaaaccctgtccccccgaagtgaccccccactacatctggatcgacttcctggtgcagcggtttgagatcgccaagtactgcagctctgaccaagtggagatcttctccagcctgctgcagcgctccatgtccctgaacatcggtggggccaaggggagcatgaaccggcatgtggcggccatcgggccccgcttcaagctgctgaccctggggctgtccctcctgcatgccgatgtggttccaaatgcaaccatccgcaatgtgcttcgcgagaagatctactccactgcctttgactacttcagctgtcccccaaagtttcctactcaaggagagaagcggctgcgtgaagacataagcatcatgattaaattttggaccgccatgttctcagataagaagtacctgaccgccagccagcttgttcccccagctgacatcggcgacctccgggagcagttagtagaggagaacacaggctccttgtcgggcccagcgaaggacttttaccagcgggagtttgatttctttaacaagatcaccaacgtgtcggctgtcatcaagccctaccctaaaggcgaccagagaaagaaggcttgtctgtcggccctgtctgaagtgacggtgcagccaggctgctccctgcccagcaaccctgaagccattgtgctggacgtcgactacaagtctgggaccccgatgtagagtgctgcaaaagccccatatctggccaagttcaaggtgaagcgatgtggagttagtgaacttgaaaaagaaggtctgcggtgccgctcagactctgaggatgagtgcagcacgcaggaggccgacggccagaagatctcctggcaggcagccatcttcaaactgggagacgactgccggcaggacatgctggccctgcagatcatcgacctcttcaagaacatcttccagctggtcggcctggacctctttgtttttccctaccgcgtggtggccactgcccctgggtgcggggtgatcgagtgcatccccgactgcacctcccgggaccagctgggccgccagacagactttggcatgtacgactacttcacacgccagtacggggatgagtccactctggccttccagcaggcctgctacaacttcatccgaagcatggccgcctacagcctcctgctgttcctgctgcagatcaaggacagacacaacggcaacattatgctggacaagaagggccatatcatccacatcggtcagccagccacagcgccaccctcctctcccttcaccccggcacccaggggtggatagggatccccaccccacagagaggagaatgcccaggaccaccctgccaggagtgtcagggtccagctctgaggtccgaactgtcggccaccaagctgttctgctgtagagggtgcctggccccggccccagggagctggggcgagagccgccattgctctgagtcagaagctggagctgggcggagtggggctcgtccaggttcagtgccccagcttggctccttcctccacttcctcccttctctttctctgcctgctgccccaccacccaccccatcactgtctccaagaaaacacaacctgccttttgggggtggagggggtgctcctgttgcagagtccttttccactcctcaaaacagaccactcgtccttgcccgccctggctcctacccagtcacaggcagctctttggggttttgcagactttggcttcatgtttgaaagctcgccgggcggcaatctcggctgggaacccgacatcaagctgacggatgagatggtgatgatcatggggggcaagatggaggccacacccttcaagtggttcatggagatgtgtgtccaggctacctggctgtgcggccctacatggatgtggtcgtctccctggtcactatcatgttggacacgggcctgccctgttttcgcggccagacaatcaagttcttgaagcacaggtttagccccaacatgactgagcgcgaggctgcaaatttcatcatgaaggtcatccagagctgcttcctcagcaacaggagccggacctacaacatgatccagtactatcagaatgacatcccctactgaggaggggaccttcgagggcctctgccccatgtgcccttgaagctgccccacaatcatggagccctgcgacctacccgccctgccgccacatgcagtggaggagaggcctgtggcccgaagagcctggtagcgcctcct

SEQ ID NO: 7174 - DNA, 3951 bp, Homo Sapiens
  NR_003654
tccggtgctcagtggctagccgaatagccgtgtttgggacctgggctcgggcttcttgcgtccccgctaagaacatgtcacggggccgaatcgtccgtattctctcagcttcaagctcctctacttttcaaccaggtcactagcccttgactcctcttatcaaacttccggaactgccaccccaccagtgactccacaggcaccagggcatgcaacagggctgggacaggaaggctctcttcttcacctcaagcctgctgggctaacacttgcgatttttactagagttaactttgtaatgtatgtctctgactctagaatttcaagagaagttccacttagtgactcctaagtggaagttctaagatggcttcccagtgaggtgatgaagaggtttgagctttagagtgcggttgcaaagctcttctctgacctgaacaatggctgtagctgtggaccaacaaatccagactccttcagtacaagatctccaaatagttaaactggaagaagattcccactgggagcaggaaatttcccttcaagggaattaccctggaccagagacatcctgccagagcttttggcatttccgttaccaagaagcatcacgaccccgagaggccctcctccagctccagaagctctgttgtcagtggctaaggccagagaagtgtacaaaagagcagatcctggagttgctggtcctagaacagttcccgactgtccttctccaggagatccagatctgggtcagacagcagcatccggagagtggagaggaggcagtggccctggtggaagacttgcagaaagaacctggaagacagaggctggagccctgcctgatgtggctctgggaattcctgcagagaagagcaggggtggccaggagatagtgagcagctcccaggaggcatggagggatccagaacctggactgaagaaccacctagaaataactcagcagaattctgaaaatgaggtcacgctggattttccaatccataggcccaaagtgaactcccacgtggagtaggatgaaaacccacagcatctagatcttcaaattctggagaaaaagagagtgtgaaagactgctcagtggctggggtgagagtcaagtctggccaggtgctaatctggagaaaagccaagacctggagcgagctggagtggcaggccctggaggatgagaaggtggcaggagtgcactggggatacaaagaaaccaagatttttctgggaattctcagaggcctggatccacgaaaaactccgcacctgccatcgaaaccaccaggtgtaccggattatggctgagcagctgtgagaacatggcttcctgtggaccctggagcaatgttgctatcggttcaaaaacctcctgaccgactactgcaaagccaggagcacctacacaccaggcaccagtgtcttctatgatgagatggatgccctgttgagtcttggggcactttctaacacctttgatgccttagaggtggtaggaggccttctttgggattgagaggattccaaagggaaccagggcatagcactagaagatgtggcgggatggtaatgaaatagtggaggagtctcaagaggaatcctggaggcttggtccccaggccttgaggtggaatcccagtggcaactctcccccacaatggacctcagagcagtgggagcgacgcagtcctgtgggaagcattcaggctcagaatcaggagatgtgattattgtcctggctctgttatgactaatttgggtctggaatggcctcatcgggggaaaaattggtgacaactttaagaaatactgtttatatcccgtcctcaaatattgcttgactcaaccctctactgaaccagtagtccagggtggctcacaaagaccactttgaggctcttgctctgctctttagccaaggagtctcccttcctgccttcagtaacaacattacaggaagagaggagagaaaggtaggagttaaagatccagtcatttgtttccatctaaagtgccctataagccgggcatggtggcgcaagcctgtagtcccagctactcgggaggctggggcaggagaatcacttgagcccaggagttggaggccgcagtgagctgtgatcatgccactgcattccagcctgggcgacagagtgagacccagactcagctgaaaaataataatattattaaaagaatttaaaataaagtgttccatagatgtgaaccctgcgtagattatacacaccagtctgccatttaaaaggtttgttgttcttgggcaacctctttaaatacccttagcctccattttctcatctggacagtggacattgtgatggtttctacctccctgggctgttatgaggatcctgacacagtattagcacttggcaaacgttagttttcattatcatcatcattataattattatgaaaatagataagggcattatcctgtaccctcaaaggagtaaaagggggaaaatgagtcattaaactttctcttctgggaactagaccttcttgagaggcactatcattctcatttcacctgtcacttccagacatgggagcagaaagtgaatttcagaactccatgtcccctcctgcttttctctgagcaggacttccagttccccagccagatggggtcacaatgctgcagaaaagtgaagagctttggaatgaagatctcccggacttcaaggagattcagaaaacgtccagtgcaggtgggaaatgaatgggagctagcattccaccaacaaagtcagccctgggattctaaactcggacaagccagcactggttaagggctgaggggaaccaggcactcagtgcacccagtttactattctgtggtgtggaaagcacaggacttgagaagcaggtggcacccaggaaagcctgttcccctaagtaagtttgaactttagttacttgaaaaaaggtataactgaattatgagtgtttatgattttatctttattttattttttttgagatggagtctcaccctgtcacccaggctggaatgcagtggcacaatctcggttcactgcagcctctacctctcaggttcaagcaattctcctgcctcaccctcctgagtagtggggattacaggtgtgccaccaccatgcccgtctctaatttttatatttttagtagagacggggtttcaccatgttggccaggctggtcttgaactcctgacctcaagtgatccacccaccttggccccccacaaagtgctgggattacaggcgtgagccactgtgcctggtctatctttaaattcctatctgaatttgtttaggttttttaaataaaaatctttctttttttttagagacaggggttcaccatggtgcccaggctgatctcgaactcctcctggactcaagctatcctcccacctcagcctcccaaagtactgggattacagacatgagccacatgcttgacctgaattttaactgcagttaattatcacttaaccagcgaattcacacaggagaaatcccctggccgggcgcggtggctcacacctgtaatcccagctcttcgggaggccgaggtgggtagatcacaaggtcaagagatcaagaccattctggccaacatggtgaaactccgtctgtaccaaaaatacaaaaattacctgggcatggtggtacgtgcctgtaatcccagctacttggcaggctgaggcaggagcattgcttgaacccatgaggtggaggttgcagtgagccgagatcacgccactgcactcaagcctgggtgacagagcaagactccatctctactacaaaaaaaaaaaaaaaaaaaattcaaccaccttaggaagcctctcatttatgtatttctagcatgtaattagtgttgcacatgggaagggctaatagatgctgacagagtgaacaactt

SEQ ID NO: 7175 - DNA, 6486 bp, Homo Sapiens
  NR_003655
agacacttggggtctggacgcaacggaggcgggagcgtgaacgcccctccagccttcgagtcgttcttgctcttcgagggcgagaagaagatcaccattaacaaggacaccaaggtacccaatgcctgtttattcaccatcaacaaagaagaccacacactgggaaacatcattaaatcacagtgtgacctaaaggacccgcaagtgctatttgctggctacaaagtcccccaccccttggagcacaagatcatcatccgagtgcagaccacgccggactacagcccccaggaagcctttaccaacgccatcaccgacctcatcagtgagctgtccctgctggaggagcgcttccggacgtgcctgcttccccttcgccttctgccgtgattgtcagtttcctgaggcctccccagccacgctttctgtacagcctgcagaactctgccccagagcacatcagctatgtgccccagctctcaaacgacaccctggcggggaggctcaccctgtccaccttcacgctggagcagcctctaggccagttcagcagccacaacatctctgacttggataccatctggctggtggtggccctcagcaacgccacccagagcttcacggccccacggacaaaccaggacatccctgctcctgccaacttctcccagaggggctactatctcacactgagggccaaccgggtgctgtaccaggccagaggccagctccatgtcctccgtgtcggcaatgatacccactgccaaccaataaaaattggctgcaaccatcccctaccaggaccgagcccctacagggtgaagttcctggtgatgaatgacaaaggacccgtggctgaaacaaagtggtccagcaacactcgcctgcagcaaggacagccacagtgtggaagaccctgtgccccttctggggtgaggagtaccaagtgcacctgccgcccaccttccacgctgtggctttctacgtcatggatgaggatgccctcagccgggacgacgttatcggaaaggtctgccttacaagggacaccatagcttctcaccctaagggtttcagcgggtgggcccacctgacggaggttgaccctgatgaggaggtgcagggcgagatccacctgcggctggaagtgcgcccaggggcccgggcctgccagctacgctgctctgtgctggaggccagatcatgaagaagtcatgctacccacgctggaatgagacgtttgaatttgagctgcaggagggggccgtggaggcgctgtgcgtggaggcctgggactgggaccttgtcagccgaaacgacttcctgggcaaagtggtgatcgatgtccagagactgcgggtggcacagcaggaggagggctggttccggctgcagcccgaccagtccaagagccggcagcatgacgagggcaacctgggctccttgcagctggaggtgcggctgcgggacgagacggtgctgccctccagctactaccagccactggtgcacctgctgtgccacgaggtcaagctgggcatgcaggataagctgagactcctcaggatgtggttctgcagcagatgaggtgcgaacaaggcctgctctgccctgggcacccaggatggcactgagttctaaaaggcaaagggtatgtggtgaggggccaggctgaggccctggtgtggtaccatcatgggcagcagcaccatttgaggccgggtaggagagacgtgcagggcctggccccccaagagaccagcagacaaactgaggcggcagagagagagattccagtgtcaccaggaagactgcagaccataacaacaatggttgctgatttggcatcaaagaggtggcactgtcaaagccgtaattgctgaaaatggcaccaacatgctgcagctggagagactgggtgaccaacatttgtttgaagaacagatgatgctctttgaatggctcagccaacagcccaaagttttaagggaagacctctctgccagcttctcttggacagtgtctcatgtaaaacctccaaggcacttacatagcatatttttgtgtccactctcttgctagtctgttgtacctggaataaaaaagcagaggaagtgacaccctcacttgaaatggtcacttcccttcaatgtgctgcagagaacgggactgatgtggggaatgctgctgctgctgcttgtcaaacatctacggctgatggccacacattacttcttcaaatgaccttggacctcagagccttcactataagtaggtacatggtacctctcccagggatgttgtgggacccatgaagagtccgctgcctgtgatgtgcaaggtgctcggagtcaggtgcagcttgtactgctataggagcctaagaatctgcctcacctacactccctctgggcaattaggtatgctgaaaatgcccaacagacattcaggactacattggtgtctgtttaaggaaaatcctcagctgctcacacagtaatgaaagagacaagctagaaaattactacttgataagactctgccacagtctctccagaggggaagggagaaggggtggatcacagcaccatgaagcatgcttatgatttttcaaccaaactcccttgaacagcagttgtactccaatgtggtgaagctattttagcatctgtcattgtcctgctcagcacactccactcccttgccaaaagcttaaaaggtctctgggatcctaagcatatttaacaaagatttaaaatgctcaggcaccaggtagcctctggtggcgatgtctggacagagctgcagctggtgagcacagaaggggcttcttcacattgactcagataaacaacatgcaaaacagcagctaagcctctgactcaaattgaggcatcaaggccaagtcaaggtagtaagacacagcaatatcacaacccctcagctaaggggtctgatgcagatgcaggactttcgagtaagtcttgacaaaatgcacaacctggccaagcgtggtggctcgcgcttggaatcccagcactttgggaggcggaggtgggtggatcacctaaggccaggagttcgagaccagcttggccaacattgtgaaaccctgtctctactaaaaataacacaaaaattagccacgtgtggtggcgagtgcctgtagtcccagctactcaggaggctgaagcaggagaatcacttgaaccccagcctcttctccacaaggcagcagagtgattgtgtcggtgtggcgatccccacaacggcgtgcagaccctactcctggggccatccgtacccctctggcctccttcccaactcctcacaggctcactcccctggggcagtttcctggggacctgtccgccctcttgctgagctcctgcagttcccctttctcagggcaatctctccaccaccttggctcctgctgccaaccactgcttgtgctccttcccagtgctgagtagctcacatgctaaatgccctgtctcctccacaggactatgagcctcagggcaggctcggccacccatgcagagcccaggtgagaaggagtacgaggtccaagggtccagggagtgagacgacctgcggtgcacaagacatgctagggcagggtggtcgaggcagctccctgggcttctccctccctttggtggcactgctctctaaagctccactgatgggatggtgtgtgcatgaagggcaaaggaggcttgctattcttttaacttaataaagaaaagtgaaggtgtgactcaccagtcctaaaccggggtgtgtccaccttggcactattgacacttggggctgatcattatctgtcatgggaagggtggctctcctgtgcactgcagggaatccctggaataccctggcctttgccgactagataccagtagtactccctcaccacggttttgataacccaaaatatcctaagatgttgctcaaatgtccctggggcagtagcaaaatcaccccggctgagaacccctgtcctaactctaagggactgcagagaagggagccagagcctggagacatgaccagactcagctacagtcacaaggagaagcattcaaactgtggcctcagtaaggccagcaccagctcaccccactgacccttgatcacaacaggtgctaattcccaaagtccagtaattaaagtcctgggaaactctcaccacagggtggagcagtgggccctcagagaaaccccacgtacagctctttttacctatacctgacttgaagggccccttgtcacatgctgtccttcatccaaacatcaggggagttgggagagggacctcacctttgggggcttgaacgggtaatctgtaggaaagtggatggtcaggaagaaaacacctccttggtaaggactgtcattctggaaggatgagacacagaaagagatcagtgcatgtgctaagcccaaagtgcaagaagcaaaactggagtggtgcgctcagcagctactacctaccgggcccatgatggtggcctgccagtggaacactacaaaacaaaagagagacgggcatgtaagagaccccccaagaaacatgtcattctactgaaaacgcactgctaaattacagcgcactgtctacacaagatgcactcacttctgacaccaactgcaagactggggttccccaaaccacccaagatgcaataactgcctaggactcccagagctcactgaaagtggttgtgcttaagattgctggttatcacagggaaacaacataggttaacatcaggagggtccaaacgcagagtttctattcttctctctccgtggagtcaggatgtgttactctcctggcattgctgtatggcaacacacacagaacacccaatcaggaatgctcactggagcctccgtattcagaattctcattggagctccaccctgagagcatgactgacttatttgaatgcccataggactgatctcaggctccagtctccagctcctccaggcatgatccaagcccccaccttattttattttttagttttttgagatggtctcactctgccacccaggctggtgggcagtggcatgattatagctcactgcagtctcaaactcctgggctcaagctatccttctgcctcaacctcctgaggagctgggacaacaggtgtgtgccaccacatctggctaatttttttacttttattttttcatttttgtagagatggggtcttgctatgttgcccgggctaggctctcacctgaaatcacatggctggtctacttggtatggccattcctcaccctaaatcacattgttggtgtgcattaaagcttccagccaaacaaagacattcctatcaggtatggtatcttacagatcgccccctacgtgttaaggatgaaggccagatcttttggggacaagattaaattctttttgttgttattgttttgtagagatggggttttaccatgttgcccaggctgtgctcaagaaatctgctagcctcagcctcccaaagtgctgggattacaggcgtgagacactgtgcttagccaagattaaattctttactacacaaatgccagtaactacaattcagtcagttctttgcacagaattaagccttggctaggcttcagccattttccttattgctctttataaacccttctattccttggttcttctcctgattcattgtgaagccctcttcaaagagtgtctctcaggagccaactgcccgtggccctggagcctcaagggtgctgccttcatctgagtcctctcctgcccaacccctgggcagtgccctgtgctctaggcactcagtaacaaggtcacgatgagcccctctcatgcttcccttccaggtcaccaccatttggtgagagtttagagccccctcttgctgcacatcacaccctctccagcatctcaggtgactttcactgctctacccattcccagaaaagctcctgtgtatcagcaaggctagcccagtatggcccaaacactcacattcaaggctcccaagtcatacaaatggtcccagggatattgactctagggccttggtggaaaatgcctactcacccacaggagtgggttgctgggatcatctgaagggcctgttattaccaagagaattctgtctcatatggattcatagtagatatggaattagcccagagtttcagacctggtcctgtcctgggtttcctgtcacctgtttaagtaccccacaggctctacacaacaggaggcctaggaaagcaccaaggtttggggtgggagcacaagtgcagggactaaagcagaagtttcccaagcccctagaggtgttcaaaagtagtcaaggtggcccatgagcccttttcaatatttcaaagaaatggtgctgaaaagaacacctttacctgtaataagcctgcctgagttaataaaaatatcacttttaaaaaaaaaaaaaaaaaaaa

SEQ ID NO: 7176 - DNA, 402 bp, Homo Sapiens
  misc_feature (141)..(141): n is a, c, g or t.
  misc_feature (379)..(379): n is a, c, g or t.
  misc_feature (398)..(398): n is a, c, g or t.
  R35106
acagccctgtgactgacagaaagggtgttttacttgtctattggagccattgagaggttctaaccagttgcaaggtgggtgaggaggaagcacagaagttgtgtggggtagaaaaagcctggggaaaatggtgcctttagncacccatcacgtgcctcaagttccaaagaatgtgaacagcaggaaaagagatttgccctctccccactgtcatacatgtgacagtagaaagctgaagatttgagccagaaactggctatgcaagattgattcaggttgattcccagggttctgttttatttccacccaggaaacaccagcattcttgaatccttttcagcattaggcaaaggagcagatgtgggcattctggcatctncaaggaggtctttgagcancacc

SEQ ID NO: 7177 - DNA, 457 bp, Homo Sapiens
  misc_feature (42)..(42): n is a, c, g or t.
  misc_feature (91)..(91): n is a, c, g or t.
  misc_feature (195)..(195): n is a, c, g or t.
  misc_feature (282)..(282): n is a, c, g or t.
  misc_feature (288)..(288): n is a, c, g or t.
  misc_feature (301)..(301): n is a, c, g or t.
  misc_feature (311)..(311): n is a, c, g or t.
  misc_feature (323)..(323): n is a, c, g or t.
  misc_feature (335)..(335): n is a, c, g or t.
  misc_feature (349)..(349): n is a, c, g or t.
  misc_feature (356)..(357): n is a, c, g or t.
  misc_feature (359)..(359): n is a, c, g or t.
  misc_feature (372)..(372): n is a, c, g or t.
  misc_feature (377)..(377): n is a, c, g or t.
  misc_feature (383)..(383): n is a, c, g or t.
  misc_feature (392)..(394): n is a, c, g or t.
  misc_feature (411)..(411): n is a, c, g or t.
  misc_feature (418)..(418): n is a, c, g or t.
  misc_feature (422)..(422): n is a, c, g or t.
  misc_feature (427)..(427): n is a, c, g or t.
  misc_feature (430)..(430): n is a, c, g or t.
  misc_feature (433)..(433): n is a, c, g or t.
  misc_feature (436)..(438): n is a, c, g or t.
  misc_feature (440)..(442): n is a, c, g or t.
  misc_feature (445)..(445): n is a, c, g or t.
  misc_feature (448)..(448): n is a, c, g or t.
  misc_feature (452)..(454): n is a, c, g or t.
  U56251
ggcacgaggcgctccaccatcagtcatgttaattcaaggggncacagtggaggaaaataaatccacaaagtagattatctaattaccatcnaaaatgagtcagaagcaaaaaacaccaccctccaacagcctcttaggagtacaccctgttctgctactaaaatactagactcatttccctggtggtgggggggnatgcaggtatagatcagaaatataatccaccttaaaattagtactaatgatcacattatttcacaagaactctgctggatgtacagntcttancattttattaagncatttgtgtnggccaccacgtntctttgtggggnttgtcctgtgtggnagattgnnantcttgggcctgtnggatncttccnaggggtttnnnggaatgtgattaacagnacttggnctgntgatnggnggnccnnnannnccnccncccnnnccc

SEQ ID NO: 7178 - DNA, 608 bp, Homo Sapiens
  misc_feature (3)..(6): n is a, c, g or t.
  misc_feature (17)..(17): n is a, c, g or t.
  misc_feature (148)..(148): n is a, c, g or t.
  misc_feature (217)..(217): n is a, c, g or t.
  misc_feature (419)..(419): n is a, c, g or t.
  misc_feature (421)..(421): n is a, c, g or t.
  misc_feature (440)..(440): n is a, c, g or t.
  misc_feature (473)..(473): n is a, c, g or t.
  misc_feature (475)..(475): n is a, c, g or t.
  misc_feature (489)..(489): n is a, c, g or t.
  misc_feature (517)..(519): n is a, c, g or t.
  misc_feature (522)..(530): n is a, c, g or t.
  misc_feature (533)..(540): n is a, c, g or t.
  misc_feature (543)..(543): n is a, c, g or t.
  misc_feature (546)..(592): n is a, c, g or t.
  W25998
gtnnnnctcacgaggangggtaaaagctccctccggctcccatgatgctgtgcatatacctagcaaaaagcaattattggacacattggagtgcaatattattaatagcattaatactactaataatgtgggcaatagtgattgtttnaaaggggcagtatactcttatcagtgcgaggtagctggggcctgtgatagtttttagagataagttctncaggcaactgtgtattttacactagtcaagtaatcctagatatccgtggtttttcttaagaaagttggctcgtaatatgatttaatattcaaagtagagtcatctacctattagcttgctggcgtggtcctagtttatgcctgtttcagcatgattggttgagtaccctgtttcatccttagcattttcttggatttggggngntaaattgatgtattccccnaatttccattgaatctgggcttccacccccccnantgagtagaattcancttgggcttaaccaggttgactgcaaannnggnnnnnnnnnccnnnnnnnnccnccnnnnnnnnnnnnnnnnnnnnnnnnnnnnnnnnnnnnnnnnnnnnnnnccccccccccccccct

SEQ ID NO: 7179 - DNA, 1151 bp, Homo Sapiens
  X00437
ctggtctagaatattccacatctgctctcactctgccatggactcctggaccttctgctgtgtgtccctttgcatcctggtagcgaagcatacagatgctggagttatccagtcaccccgccatgaggtgacagagatgggacaagaagtgactctgagatgtaaaccaatttcaggccacaactcccttttctggtacagacagaccatgatgcggggactggagttgctcatttactttaacaacaacgttccgatagatgattcagggatgcccgaggatcgattctcagctaagatgcctaatgcatcattctccactctgaagatccagccctcagaacccagggactcagctgtgtacttctgtgccagcagtttctcgacctgttcggctaactatggctacaccttcggttcggggaccaggttaaccgttgtagaggacctgaacaaggtgttcccacccgaggtcgctgtgtttgagccatcagaagcagagatctcccacacccaaaaggccacactggtgtgcctggccacaggcttcttccccgaccacgtggagctgagctggtgggtgaatgggaaggaggtgcacagtggggtcagcacagacccgcagcccctcaaggagcagcccgccctcaatgactccagatactgcctgagcagccgcctgagggtctcggccaccttctggcagaacccccgcaaccacttccgctgtcaagtccagttctacgggctctcggagaatgacgagtggacccaggatagggccaaacccgtcacccagatcgtcagcgccgaggcctggggtagagcagactgtggctttacctcggtgtcctaccagcaaggggtcctgtctgccaccatcctctatgagatcctgctagggaaggccaccctgtatgctgtgctggtcagcgcccttgtgttgatggccatggtcaagagaaaggatttctgaaggcagccctggaagtggagttaggagcttctaacccgtcatggttcaatacacattcttcttttgccagcgcttctgaagagctgctctcacctctctgcatcccaatagatatccccctatgtgcatgcacacctgcacactcacggctgaaatctccctaacccagggggac

SEQ ID NO: 7180 - DNA, 2783 bp, Homo Sapiens
  XM_001124203
aatataatcagccaatcgttgccccttggggacgcaggataaagcaagtcatccatgaccaatgtggagtcggccgtgcacaattacatgcagacctgcaggacatcgagtccctgctatggtccctccccagtcaggcccccattgcctgggctgcagccagaagcattcaggcacaagtgcattcaaccaatacttacttaattgtattggtggttagagggttgcgattgattaaggtacattaatggatgcatgtcctccctgtatccaagactctgtcatttgtctctgcagttcctcccactgaagaatcggagtatatttctccagtccctaatgttgagttttgaattgtgtctagtttggccactggaatattaatctgtatgaccaaaaacttggaaagtgtgcattcaattgtgctcgctcactcctgctatcaccatgagaacaagcccaggccagactgctgcttccagcagaagataagagacaccaagagcaaagtcgagcttcccagacatgctcatgctagattgaccaatcctcagctgacccatagatccatgaaaataaacgattgttgtattaagccactgagatttggagtgacttgttatgcagcattttgtgacaacaactaactgatacaagggtcaccatcctttatctctgtagattttaaccaatttttaatagctagatggagatcttctagttgcctttatttataatgaatatgactgtagagcttgtttggcctgacactaccagtaacctatccagaaattcagaaataatttcttctccaacccgccccaaccaaccttttgtttgtttgtttgtttttgggttctccctctttgcctaggctagagtacaaatggtacagtcagagctcactgtaacctcaaaatcctgggctcaagtgatcttacccttcagcctcctatgtagctaagactacagacatgtgccaccatgcctggctaatttttttattctttgcagagagagggtctcactatattgcccaagttggtttcaaactcctggcctcaagcagtcctcctgcctcacccttccaaagtgctaggattataggcatgagccaccacacccagcctcttattctttttaaatagaaaccttattttattctgacagtgggttgctttcttttttttttttttttttaagaaaaagttggcccagccccagggaataaattttgactgctctaaacagggttggccaactatagaccaagggccaaatctggccctctgactgtataaattaagttttactggaataaaaccaggtccattgatttatccattgtctacataagcttttaggctacgatggcaccactgtgtcactacgacagaggttatctagaccaaaagcctaaaatattaccgtttgcatctttatggaaaaagtttgccattccctagtctaaggtttagattctgagcttatcattttagcctaaccccccttaccagtgactggctaaaaacaagtctgtgattccattctgactgttctactgagggaattcccccttcttctcatgcagagctgatgagggttagttgtattaataggacatacactcaggttttctgaaaaatacttttatctagaaatgcataggaatatgctggtgcctgaatgtaccatctgggggcctggagattgactcatctgcctccagagctagtgctcacacttactactgagaggcctgaggaaatgcctgcctacccaccaccagaacctgcatatgtcacctggagaactagagatcagcctgccacgcacaccacccaggagcccagtggtgcacctgcccacttggcccagtgctgccactgccagcaaccaaaggagccacctggaggcccagggattggcccacgcagacaggctatcatcagtgcccacaaacactgcccacagtccctagtattgacacacctggtccaccaccgctaccactgatgctgaaggacaagacttcctggcatccccatcctcagcaaagcctcaccacagcctccaataacaactacagtctggccaagtgtggtggctcacgcctgtaatcccagcactttgagaggccgaggcgggtagatcacgaggtcaggagttcgagagcagcctggccaacatagtgaaaccccatctctactaaaaatacaaaaattagctgcgcatggttgtacgtgccgatagtcccagctactcaggaggctgaggcaggagaattgcttgaacccgggaggcagaggttgcggtgagctgagattgtgccactgcactccagcctggtgacagagctagactccatctcaacaaccacaaaaaaaaacactgcagtctaagccactgaatgactcacaggcaccactcatgccaattacagctgaaggaatcatatgcagactataccactgtacccacccagaatcaaagccaaagtgtgatatccaatgaacactgtagatacagctataagaaaaggtctttcccatataaaagccaatccataaaattggaagaaatgactgttatgtcagaggcacagatagtcacataaggatgcaagaaatatgaaaaaggaaacataacatctccaaagaagcacaataattctccagcaacagatccaatgaaaagaaaatctatgaaatgcctgaaaaaaattcagaataatgttattaaagaaactcagggagatacaagagaacacagataatgaatcc

SEQ ID NO: 7181 - DNA, 2542 bp, Homo Sapiens
  XM_001124642
ttcaggtagatcttttgcgagcaggagaagttcctaaaccttttccaacacattataaagatttgtgggataacaagcatgttaaaatgccttgttcagaacaaaatttgtacccagtggaagatgagaatggtgagcgaactgcggggagccggtgggagctcattcagactgcacttctcaacaaatttacacgaccccaaaacttgaaggatgctattctgaaatacaatgtggcatattctaagaaatgggactttacagctttgatcgatttctgggataaggtacttgaagaagcagaagctcaacatttatatcagtccatcttgcctgatatggtgaaaattgcactctgtctgccaaatatttgcacccagccaataccactcctgaaacagaagatgaatcattccatcacaatgtcgcaggaacagattgccagtcttttagctaatgctttcttctgcacatttccacgacgaaatgctaagatgaaatcggagtattctagttacccagacattaacttcaatcgattgtttgagggacgttcatcaaggaaaccggagaaacttaaaacgctcttctgctactttagaagagtcacagagaaaaaacctactgggttggtgacatttacaagacagagtcttgaagattttccagaatgggaaagatgtgaaaaacccttgacacgattgcatgtcacttacgaaggtaccatagaagaaaatggccaaggcatgctacaggtggattttgcaaatcgttttgttggaggtggtgtaaccagtgcaggacttgtgcaagaagaaatccgctttttaatcaatcctgagttgattatttcacggctcttcactgaggtgctggatcacaatgaatgtctaattatcacaggtactgagcagtacagtgaatacacaggctatgctgagacatatcgttggtcccggagccacgaagatgggagtgaaagggacgactggcagcggcgctgcactgagatcgttgccatcgatgctcttcacttcagacgctacctcgatcagtttgtgcctgagaaaatgagacgcgagctgaacaaggcttactgtggatttctccgtcctggagtttcttcagagaatctttctgcagtggccacaggaaactggggctgtggtgcctttgggggtgatgccaggttaaaagccttaatacagatattggcagctgctgcagctgagcgagatgtggtttatttcacctttggggactcagaattgatgagagacatttacagcatgcacattttccttactgaaaggaaactcactgttggagatgtgtataagctgttgctacgatactacaatgaagaatgcagaaactgttccacccctggaccagacatcaagctttatccattcatataccatgctgtcgagtcctgtgcagagaccgctgaccattcagggcaaaggacagggacctgaggagccgagcgaatagcatctcctcccacctcccaccagagacgtcctgtttgagctgtcaggtgtaatatatgaattgacttaagttaatataaatgtgtacataatccacatttgtagtcaaggacgcaatctcttccacacatgtgcagttgtcagttggtacatctaaactccctccatcctgactcacgtggacttagatatgttttgtttctattttcttctatttcagtttttcattctttgatgtttatttcttttgtccatcagatctcttgtgaaatcccatggaaggttgtgctcagcctgtcgggtctctttcttcctgcccatatattataccagttgcttctgcagcccgcagatgccagcgatgccaggaaacaagttgaaatccaggaatctctttaactgattttgctaaaaatctccctgtgagccttccactcaactcttaatatgcttgcattgtttaagtttttaaattctgaaaattaataattagggtttttttcatatgtgttgcataatgcaaacctcctaggttaaaatagtttctttatttaagatagaataatttccagaaattgtacttttgaggtatcatttttatctgtaatggtttgtctgtcttttttcctctgatcagtatttttttataccagttttggagactggctgagatgaaaggaaatgtggaataaaaggaggttttcctgatgtggtgtaaagaaaacagattcaagagaattgaagattttttttgtttcttggtacttttttctttttaaattaggactaatgtttcttttgtggtgcttgaggcatattcatataaccaaagtttgagaactgggaacttcatgctgatttgtacatattgaagtttctctggtattcaaaggttatatagtgaatgaattttcattaataaatcactttgtcagaaactcccatatcatctatattttatatatgtatatataaacgtatgctctttaagtgtgtctatatgtgagcacataaaatctaaataaaattggactggtgggaaacaa

SEQ ID NO: 7182 - DNA, 4606 bp, Homo Sapiens
  XM_001125680
gttcctgtgctggatcctgggcggcctgagggcccgcgggccagcaccatggaggacgtgaagctggagttcccttcccttccacagtgcaaggaagacgccgaggagtggacctaccctatgagacgagagatgcaggaaattttacctggattgttcttaggcccatattcatctgctatgaaaagcaagctacctgtactacagaaacatggaataacccatataatatgcatacgacaaaatattgaagcaaactttattaaaccaaactttcagcagttatttagatatttagtcctggatattgcagataatccagttgaaaatataatacgttttttccctatgactaaggaatttattgatgggagcttacaaatgggaggaaaagttcttgtgcatggaaatgcagggatctccagaagtgcagcctttgttattgcatacattatggaaacatttggaatgaagtacagagatgcttttgcttatgttcaagaaagaagattttgtattaatcctaatgctggatttgtccatcaacttcaggaatatgaagccatctacctagcaaaattaacaatacagatgatgtcaccactccagatagaaaggtcattatctgttcattctggtaccacaggcagtttgaagagaacacatgaagaagaggatgattttggaaccatgcaagtggcgactgcacagaatggctgacttgaagagcaacatcatagagtgtgaatttctatttgggaaggagaaaatacaagagaaaattataatgtaaaatggtaaaaacataagtagtttttttttcaattacatgttgcttccagacatacttctctgcaacttgttgagcaacattttaagatgttggacttctgcaatagatgacactgatggttttactcctttttttaaaaacacatgcgcgcgcacacacacatgctttacaagttttattataaaccaagaattttggacttgcaaagaggtattattgcaataatgcacttttcatacttgaaatttatttgtatgatataaagttattactttaaacaaaatgcaagtatggggggattgtttataaagtttgggtaatttataacaaaatttgctaaggtttgctaaaaattcatttttctgttctatatattacatttttaacataattttacagttcaattttatgatggagcctcttacagaaacattaacaaaatgcaggaatctgccacatttcttttttagtataacttaatagcttaattaccattttattttttatacttcttccattattaatctttaaatcatgatcctaattagctgtccttactttaacttgatctaattattgcttcctttcttattactttcctaatttttctatattttaaaaactacagtttccatgataaaaggaaaacgttttgatttatagtaccaagtgcttaaacacaaggatagtgttagattttcgagtgactttcctttttgcattttttggcagtaaaagccaaacgttgtatttgttcttttcagagttgtccagcccttttttcctttgtccaaaatgattctaaatagaatctaataaaccaatgtagcattatttttttctaaatgaagccccaaaaaagaaaagtgccttgcatcatttaaaaaaaataattaaatcctcatggcctctaaattagtatgtagaacactgaaaagttcttaacatttttgtgtaatttcctttctttttaaaccataaattagtttaaactgaaagtacgaggctggaagaaatattagtaaattatttggaatatagaatgtttactctttctttttatgttgtcttaatgattctgtgagattgttccggctcaaacagaagcttttctttggggaaggtgatttgtgggagactctagtgtattttaaattagcattttaatccattcttgacattcagttagtccagatctgccccataatttgctttagtaaagtcactttatggatttttggctatgttttagtttgtgtgtataaaagttctaagaaaacatttttgctattttaagtatgtaagggaagagaggagtgtttttaactttttatagttgatgactttagggtagcacaaacaaaactcctttgtatctaacttttctcaatcctctcttgaggtgctttactaatgggaatgatttctgtatgttcccttggtaccaagaggtactatgcaaagtaacctattacaccaagttacttgctttgctttcctctctatgatgtgataatacagtaaaagctttcttacccagcatagtgggagagtggagattaattaaaattgttaattaagagttaattcctattgacccaggtgatatttctcttctgatttccctccccttcccttctcttatcttaccactgtgaaaacagcatattgttaatctcgttgtcgtccagtattctgctttgtgattaggtcttttgatgtacagtggtctagtggagtcaagattcgcattgggttttctaaaattccagttgataaaagttccagataacacagctttcctgtatatagatcactattgggcaggtcagcaaagatctcttacagtgtaataataatctatgatgcttcatttagcagaaactctgcttaaaagaatcttcataatagtaagtttaggttttaaaaacttgtttcataaatatacatatatcctctctagtagtctggccaaaagaacagattttgttattgataatttgtagctggtaattttccacattttctatccactgtaatttttatgttgtcactgaagtgcctgcccagtactgtatattacagtctctcacaaacactgggaaaagggactgtcatcatcttgagtactctgtgtgtatatatatatatatagatagatagattttttttttttttttgagacagagtctctaatgtcacccaggctggagtacagtggcacaatcttggctcactgcaacctccacctcctgggttcaagtgattttcctgcctcagcctcccaagtagctggggttagaggcacatgccaccatgcctggctaatttttgtagttttagtagagatggggtttcaccatgttggccaggctggtctcaaactcctgacctcaagtgatccacccacctcggcctcccaaagtgctgggattacaggcgtgagccactgcgcctggctgagtacaatattaatgtagacaaaccatgaagtttattatttcatataagaacattacaggtttgttttttcttgcatgtctgtccacctaatgtttaagtagttctggtagctcttcctattctttattctatttgattccatttctgtgattcttttattaccactgatgttttgtgatagttaactatgataaatttaactgatcatgatttatcttctagagtatttaaataatgtatgagtgaccacccaattccaacattaaaagtgtaatctgggcccataatttatagtgaaattgtatcaaaacatagggaaactgtattactgtccattttgaaaatatgaaacttgagtattgaaaatattcaaacatggaatggcagtattctaatttcagttagttggttcatgttaatttcttacctgttagatgtttaaactgcagtgacctttacttgtatctactctgtggtggaaatgttaaaccatgatagcttttgctaccaactcaaccacttaacttttagagcagttttggggagagtttatgcttcatctgagtttagaagtaatgtcagaaaatgttaagcatgtctgtattaagaaaatataaggtttctaattgtcttattaatatggtaattcaagtgaattagaaatatttaactgcaatcttgaattataaagttgagatatatatatatatgtatcaagatctcaacttgatgtaaagtaaatgagcagttacctggcggatttttttttttttaaataactgatttaatccataatcccataacaaacatagcttcacctcagtattttctttctttctttgttcaacagtgctccgataagggaatgctagaaaatagatgagaagtactgaaagacctttttttttaattgattagaaaagtaagtctctagggtctttgaatgctggaatttttttttttttttttgtctttcccatctgtggcagctaaaacaaaaatcactcaaaatattcaggtttacatgttagctctctctcatagggagctgccatacctcacagttcaaagtgtattctatagatcagtaacattatactgacatgtaattgcaatttactatgcagcaaaaatgattcaagaagaaaaataacctacagtgtctgtatacctttgtatacacaattgcttaagttactctgcttttaacatttgtacttggataaaatgcttatgtctgtataggaatgtcacagtgcaagatgctgctagcccaggcacaaagtattaaaattattttgtgaagattggtggttgtattaaaactgctgtgccattatacctccaaaa

SEQ ID NO: 7183 - DNA, 3996 bp, Homo Sapiens
  XM_001125720
gctgtagagtcatgtgactcgagtaacatggccgctgtctcgtgagtcccgctagtgccgggcgggagttgttaagcggccagggtcaggtgtgctggagcggggtccgggcccgggttccagggcgaggcggcggagcgtggcaggcaagcctagagcggcgtggtccatgcgccggcgccgggggcagagcggagccgcagactcccctggccccggcgcggccccggcagccgcgggctaaggagtcgcgaggttcccccagctgccaccatgaaccccgagaaggatttcgcgccgctcacgcctaacatcgtgcgcgccctcaatgacaagctgtacgaaaagcggaaggtggcagcgctggagatcgagaagctggtccgggagttcgtggcccagaacaataccgtgcaaatcaagcatgtgatccagaccctgtcccaggagtttgccctgtctcagcacccccacagccggaaagggggcctcatcggcctggccgcctgctccatcgcactgggcaaggactcagggctctacctgaaggagctgatcgagccagtgctgacctgcttcaatgatgcagacagcaggctgcgctactatgcctgcgaggccctctacaacatcgtcaaggtggcccggggcgctgtgctgccccacttcaacgtgctctttgacgggctgagcaagctggcagccgacccagaccccaatgtgaaaagcggatctgagctcctagaccgccttttaaaggacattgtgactgagagcaacaagtttgacctggtgagcttcatccccttgttgcgagagaggatttactccaacaaccagtatgcccggcagttcatcatctcctggatcctggttctggagtcggtgccagacattaacctgctggattacctgccggagatcctggatggactcttccagatcctgggtgacaatggcaaagagattcgcaaaatgtgtgaggttgttcttggagaattcttaaaagaaattaagaagaacccctccagtgtgaagtttgctgagatggccaacatcctggtgatccactgccagacaacagatgacctcatccagctgacagccatgtgctggatgcgggagttcatccagctggcgggccgcgtcatgctgccttactcctccgggatcctgactgctgtcttgccctgcttggcctacgatgaccgcaagaaaagcatcaaagaagtggccaacgtgtgcaaccagagcctgatgaagctggtcacccccgaggacgacgagctggatgagctgagacctgggcagaggcaggcagagcccacccctgacgatgccctgccaaagcaggagggcacagccagtggaggtccagatggttcctgtgactccagcttcagtagcggcatcagtgtcttcactgcagccagcactgaaagagccccagtgacccttcacctcgacgggatcgtgcaggtcctaaactgccacctcagtgacacggccattgggatgatgaccaggattgcagttctcaagtggctctaccacctctacatcaaaactcctcggaagatgttccggcacacggacagcctctttcccatcctactgcagacgttatcggatgaatcggatgaggtgatcctgaaggacctggaggtgctggcagaaatcgcttcctcccccgcaggccagacggatgacccaggccccctcgatggccctgacctccaggccagccactcagagctccaggtgcccacccctggcagagccggcctactgaacacctctggtaccaaaggcttagaatgttctccttcaactcccaccatgaattcttacttttataagttcatgatcaaccttctcaagagattcagcagcgaacggaagctcctggaggtcagaggccctttcatcatcaggtcagccttggcggcgcgctttctcctcttcctcccacggccccggcttttcactttcacgccattcaagtgtcaaagcagccaccttctctttcccttctctctcctccttttcctgacctttggatctgtaagaaatgaagaaggttgccccttcatactggttgctgatgcttctgacatgaaacagacagggcccttggctggggccaaatcaccaaggtgtccaaggccaccggccgtctgcaccactggcgcccctcccaagcccagctcccacatcaggctctgtcatcccctgcagctgccgaatctcgagtccatttggcatcgggaccccctcctcactctggtgacccctgtccccacagcccaagcagccatgctcccactgaatcagcggtcacccccacttccaggagcccctgtgatggaggggaggacctggcagcagattggtgggaaagctcccctcctcggtggccaccacatggcacacgtggtcagacccctcatcaggttcacgctggccccttgccagtctttcactaaaagcacgttctttgttgtctgcacacctgagaagcatcacctcccccagccccatagctcaggcaaccagcagggctgcgtgtttccctgggttgcccttggacagccccgtgcgcttctcccttctctctccgcctgcgatttagcagagtcacgaagatcacagaacccccacaaccctggccccgtcacagaaacacacccaaaagggtttctgctgcatgcgtggacaggccacccgctttgtggccaggtggctcgctccggccctctcggcaccccagccttcagcacctgtcctgggctcatgtcccatgggacccatcagtgtggccagagtgcgctggtgctgattgccctgaaaagggtcgggtgcccaccctcagacacaggagcaggtgtcatgggccgtcatggttctggaaccagaatccaaggccatggacatcaggaggcagagccaacaatggtgtggacctggtggtctgggtttaaatgctcacagaggaggagtgtgaagcaggccctaccaagggccaccatgggggctccgctgaagctatgccaagaattggcttttaaaggctgcctgaaatgtggtttggagccaaaaatctatagagccagcgcatttgtgaccttgttgaaaatgcttactgaggaaaaacaaggggtgatgcctaaaatagagagcaaaattgccacctctctgccccagccccctccccgacccccgcagcccaaggtcgcaggcccccaggatgggccctgggcctgcgcgagaagccccccgccccagaccaaaggccagaagatatcgtggagcccctgcccgggggccgatgcccaacacgccattcctcttactgcatgggcagggcgggccccacccaatgccagactccgaccctatgtggtgcccacgcacgacactccttcacggtctgcaccttgttactcactactacgggaccacctacgacacgcccaagtgatctccgattctcctctggctaagattaacttcgacgtcagacccaccaccaagctttacaggaagcttcacgacagtacactcagatttttcataaggaccgttggagttcgaggctcccggtgctgccaggacaacagccccagggacagctgccagatctctgcccccggaagaggcctgaagccagcctggcctgggactacccagttagcggcttgtagatgccccccaccccctgcccctcatggtgcactccccctgggacccccatctcttgcaactgtacatctgggcccctccgctggcccccagcagtccccacctgtcctgtggacatcacagccctggccccaggatcctgttaagggactgggcaacacagaccaccctcccctggccgatcccagagctggctccggatgggccttcccgcaccccaccacccaccaccactggcagcctcatagcaaccactgcagagagcagcagattttgctcgtggaagtggactag

SEQ ID NO: 7184 - DNA, 856 bp, Homo Sapiens
  XM_001125724
gcaactcccggcggcccccgcgctcccgggtggcaagatggtggcgcgcaggaggaagtgcgccgcgcgggacccggaggaccgtatccccagcccactgggctacgcagctattccaatcaagttctctgaaaagcaacaggcttctcactacctctatgtgagagcacacggcgttcgacaaggcaccaagtccacctggcctcagaagaggactctttttgtcctcaatgtgcccccatactgcacagaggagagcctgtcccgcctcctgtccacctgtggcctcgtccagtctgtagagttgcaggagaagccggacctggctgagagcccaaaggagtcaaggtcgaagttttttcatcccaagccagttccgggtttccaggtagcctacgtggtgttccagaagccaagtggggtgtcagcggccttggccctgaagggccccctgctggtgtccacagagagccaccctgtgaagagtggcattcacaagtggatcagtgactacgcagactctgtgcccgaccctgaggccctgagggtggaagtggacacgttcatggaggcatatgaccagaagatcgctgaggaagaagctaaggccaaggaggaggagggggtccctgacgaggagggctgggtgaaggtgacccgccggggccggcggcctgtgctcccccggactgaggcagccagcttgcgggtgctggagagggagagacggaagcgcagccgaaaagagctgctcaacttctacgcctggcagcatcgagagagcaagatggagcactctgtggaaagaggcccagcctggcagcaccctgtgtggcggttccccatcaccccctag

SEQ ID NO: 7185 - DNA, 950 bp, Homo Sapiens
  XM_001125771
atggattggagacagcaactgggagacttttgccacagcaccctcatcacatgtgtggattctgggattctcagagtctggcatgacaaggacaaggacacatcctctgacccactcctggaactgagagtgggccctggggtgtgtaggatgcgccaagacccagcacacccccatgtggttgccacaggtgggaaagagaatgctttgaagatatgggacctgcagggctctgaggaacctgtgttcagggccaagaacgtgcggaatgactggctggacttgcgggttcccatctgggaccaggacatacagtttctcccaggatcacagaagcttgtcacctgcacagggtaccaccaggtccgtgtttatgatccagcatccccccagcgccggccagtcctagagaccacctatggagagtacccactaacagccatgaccctcactccgggaggcaactcagtgattgtgggaaacactcatgggcagctggcagaaattgaccttcggcaagggcgtctactgggctgtctgaaggggctggcaggcagtgtgcgtgggttgcagtgccacccttcaaagcctctactagcctcctgtggcttggacagagtcttgaggatacacaggatccagaatccacggggtctggagcataaggtttatctcaagtctcaattgaactgcctcctcttgtcaggcagggacaactgggaggatgagccccaagagcctcaagaacccaacaaggtgcccctagaagacacagagacagatgaactttgggcatccttggaggcagctgccaagcggaagctctcgggtttggagcagccccaaggagctctccaaacgagacggagaaagaagaagcggcctgggtccaccagcccctgacgcccctgtgcccactttgtaaataaactgctgaacacccaccatga

SEQ ID NO: 7186 - DNA, 996 bp, Homo Sapiens
  XM_001125802
gggttcttcttgctgcagggggcctggccactcatgggtggtcaggacaaacccttcctgtctgcccggcccagcactgtggtgcctcgaggaggacacgtggctcttcagtgtcactatcgtcgtgggtttaacaatttcatgctgtacaaagaagacagaagccacgttcccatcttccacggcagaatattccaggagagcttcatcatgggccctgtgaccccagcacatgcagggacctacagatgtcggggttcacgcccacactccctcactgggtggtcgacacccagcaaccccctggtgatcatggtcacaggaaaccacagaaaaccttccctcctggcccacccagggcccctgctgaaatcaggagagacagtcatcctgcaatgttggtcagatgtcatgtttgagcacttctttctgcacagagaggggatctctgaggacccctcacgcctcgttggacagatccatgatggggtctccaaggccaacttctccatcggtcccttgatgcctgtccttgcaggaacctacagatgttatggttctgttcctcactccccctatcagttgtcagctcccagtgaccccctggacatcgtgatcacaggtctatatgagaaaccttctctctcagcccagccgggccccacggttcaggcaggagagaacgtgaccttgtcctgtagctcctggagctcctatgacatctaccatctgtccagggaaggggaggcccatgaacgtaggctccgtgcagtgcccaaggtcaacagaacattccaggcagactttcctctgggccctgccacccacggagggacctacagatgcttcggctctttccgtgccctgccctgcgtgtggtcaaactcaagtgacccactgcttgtttctgtcacaggaaacccttcaagtagttggccttcacccacagaaccaagctccaaatctggtgagacctcctacaagctagaagaataa

SEQ ID NO: 7187 - DNA, 8160 bp, Homo Sapiens
  XM_001125827
tgtctttatagcagcatgatttatagtcctttgggtacatacccagtaatgggatggctgggtcaaatggtatttctaattctagatagaatgtttcctcttataactcatagtgaatatgactggacaatgaaactattttgtaatttctttcctgaaagataaaggcgttagaacatagaatctttcattgattctacagaatcttaagactccttcagagatggcagtcattcctaccgtgctgaacatcatgttgtcacggtcagaatcagaactaaattgattaagggtctgaaacagtttggcactcttgggcacttattctgataagaaagctgatgagacagggtaatgaaaagaggctgcaagaaatgaccattcatgcattcagccaacatttaggccaccctcctgtattccaggcactgtacgtggcactgagaatgcaaagcaaaacgagtcatggtctactggcaggagccttctcagcggagaaaagatcaacaagaaaagtgcctgctggagacctctcctagggcataaaccaatatagaggtggggcagctacgtcagcctgaggtgtccttaggcagaacagaaagtgagaatcagagcagtatctcatttctgaacacctggattgtagctttccctggactgactgtcaaaggaggtggttttaaaaagcaagccaaacaggtttccatcctttaggaagaccctggaacgtgccagttgattctgacaatttctcatgaacagaaacacctaggaagggagaactggtgagtcttttcaagaggaggaagtccctcaaaaggggctgtgtttcgcaaacggcgccccaaaagggctgaaatacttcgatctggaggaaaaagactcaggcactgagggaaggggagggtgcacatctggagtaatttcaaggctttttccgtgttatctgatgtggcaacaagtaaagatttgttcgttttattatttttttaatttttaaagattttcttttccccccttttccccctcccggccactccggtttgtgtttgccacaagactcataattcctttagaaagtggagtcgaattcataaaagtgatgggggggagagcgcggagagggaaggctgggagccccagggagtcttcactacctacactgccgctcagctcccggcgcgagtggaggtcggggtggggagacgcgactcctgcccgggatggctgacactctgcgagccccggcggcccgcggccgggccgggtgactaggcggagggcgcggagggtccgcggcgggcgggtggcgctgcagcagcctgggcacggctgccgccgcccgcgggcgagagtgtgcacgggtgtggaaggccggagtgcgggccgtgaggggtgtgcgcgcttgagccggagcggggctcgcccctcgtcggctcccgccgcccagccggtgatcgctctccggccgtccccggcaccctcggccccccacggcggttggtccgggcgggggaaggagaaagtgagactcggtgtcatcaccaatccatcgccagaaggggaggaaactggaatccagcagcggcgagcagcagctgggcggtcacatctggaaatggaaagccgacctccccctcctcctccacctcctcctcctcctcctccttctcctcctctcacccaggatcacttccgaaaccacttggccttcagcccctgcctcggccagaggtttcatttttaactgaatatttacgaaagctgaaagcgtgcgaggggggtggggtggaaatagcggctgcttcttttccaaggatttatttaatggggatgtgttcaaggcaagaccgaattcagaaggatatcgacgtcgtgatccagaagtccagagctgaggactgcctgtttgcaggtgagttcttgcttttccagaacctcggacccagcgcccccttctcagttctccgaccgcgacgtgtgtggctgggggtggggtggagggtttgcacgtccgcattccggggttcatttggcgacagctgctgcaacgaacgcgggagccaaaagcgggagggggcgccagcctcgccccttcccctccccccacccccaagtctggggcagctactagctttgaaggcagaacccgagtggcccgagcgggggtctaggcgaaggggcagtgcgtggtatttccagccccgcgtagtgcccgaagcctgcaagcacgcctcctgggttccagcagcggcggcagagcggggttggttggacccgccaggtttgcgtaatgggctgagcggcggcggccgggaatggagcctgctgccctgcgctcgtaagctgcgcccggcgccgaggacccccggggggcagcgctcggcccatctccggccccttcggctccatctagtcccctccgactggcaaagagaagggattcctcggattcccaaggcacccagcgcccctgcctggggggtcgccgttcgtccattttgctcccccgggagagagatcggattttgctttcgctgccgcgagcccggctggggctgcttccggcctccccgaccgggaaattcccgccgttgccatggcacccggcacttgctgccgggggcggcctgccgctgcacccagtcgggggcgcgccgcatcccctcggacgctgcgcggagagacctcgccgccctctagccctcgcctcccgcccggccaggcctcccctgactccaccaaatggagggcccaagtcctgatcggggttaaaacaaatccactccaggggtagcttttgacaggactttctgtttcagattcagatactcagactccacctttacttttacctatgttggcggccccagaaggtatttatgggtgtagagttgcttcatttcctgttcacactcttgtgtttcctttgttcttagcgtgttccgtgttcgggtattttggttgcttgtttgattactgtggcttttctttacctacaacccaagcctgacgtcccacggttttaaatagcagggggaggggaatcaatgtttgattcaggtgtttcgaagaccacgccacaggcgatgagcagaactcttcatgttgaaacggttctgctacagtactagattgctctcaggcgatttggggttgatacaggcaagccggtgcaaaactggaatactggatatgaagtgaaatgtataaaagacataaaatgtcacaaaatagtttgatcacaagtgttgattttcctggtgagttggggctgcgtgtttccatgttttctgaaggttcacataaacatgcagcctgccaattctctgtacatttttttttcaatgagtggtatttcggttttcacgtttagttgtaagacagaaattggagacttatatgtagctggagtggatgacttctttcttttgggggaagaatgagagatgcacatttcgttagtaaattgtgaacaacttgaaacgaacccaaatccaattttgaatttaagaagtagagttaaaatgaaaggtagccattcaaatactatgccttgctgccttcacttattaagttaggattttcttccttttagccctttagggatacagtagtttaaaagagcagtagccacatatgaaaggatcagatttagcttagagggaattccttagaccagccctgctgttaagacttgacattcaatattgtttgatcacattccaaaatatagcttagctaatggcaacatttgtaaacatataaattgcaaaagaagctttcttgtgtacatacatttttaaaagcttgaaattgatgtgaacttttaaaaacacgtaggatctgtattacattctacttctcaaaacaaatttaattaaagtgaatatcattccagtatatacaatatgcctaagacccagaattggcacattgatttactagttgaaaatataacagtattcaccaaacttcaatgtatactttttggagagaatgaaattacagtatttcttaatttactgtaatgtcatctttgtaattatgaattaacaattcaatgagaggagacttggttgattaaattaatgctggtcctacacattatatctaaaggatcttcgtatatgactactatcctcttggattattttaacagttaaaatatacaaagtggcccattaaaaacagagttgacttttcaccattgctgtttttctggtgagacatgtggaaaggaaggacaggtggacttttcaactaactagctctctgatttttaataagatacctcagttcttttggcctcagtttacttatctgtacaaagggtaagtcatatgcttaatcactaagatctgttagatactgcagttaagattctttatcagctaattactgaactctagtgttaacatagctagaggtggaaaagggagcaagaccaggtgttgggatgaataattaactaatcgagataacatcagttttcaccataggaacaagtaccatggttgctcttaaagtaagagatgtttcctattttatgtaattttactaagggataatgttttcttttgtcactgatttaaatgtacctggatgtttctcagccatttggctaagatcgaacacaagtaatacctgggccttttatatgtaatctagtgtagaccagcctgttaaaagagaaagacaattggttaaactgctgatgtgttgctttgtcttctcaaaagcttgttctataatacaatatgtaaaaagttgttacagtgtagtaaccgtagataatccctttatgatttgtacctaatggtgaagaccttttattttctgaaaataacgtgtttgttttcattaccgacattagaagccaatatttattaatctatttctcatcctgacatttcagtcagactcttaaaataatcttgctgtgttttgatttaatgtgcttatcaacttataatattgaattaatgttaatagtgtcattttaggtgaactagacttcattgaaggaggtgggagccttatggagagagagtatatgattatctctatttgtatttaattaccatttcatctaaccattcagaacatatttcaagaataattttaattcaagttgtagataaaacttactataccattttcattttgacgctttccaagaatgagatacacggtattttaaagacaaagattgatcttacatgttactattaaaaaaaacacgataattttgttctacatttatacttttaatttttctgtggataataagaaatgccaagagtcgattgtgtccatgctggcaagtggcctaataaattgtccttttatttggtggtcctcagagtggcagttaacatcttgctattctgccttgtggacttgaggtggaaaggttcatggaattatatccttgcttttggatgtgcaaactgaggctcagagagtttaagacacatagtcactttcaccaattaaatgatgaagctgccatgtaaacgtatttcatcacactcccgagaccttcttctccagtagtgttttcaagctttttgagcatgcagacactaccatcaaaaaattatgtagagacatacttgagagttacagtttaaagaaaaacaaggtgtaattatttggttattagtagcatttacatatgcttgaaaacttctgctatatatacagtaagattaatttattctaacaatgatcttgataattcccctgattcccagactccttggaatagctccacagctatcggtggttctgccacaggttcagagccttcccagtactgccttcttatttgagaggtgtgctaagagctataaagcagaggcttcaattgtacacagtttggaagtttaggcaaaagtcatttcttccctatattttgtcatgcttatctcctgtctctttctgttttacagattagcaataaactccttaaaacccaaaggtttgggcttctgttcctttcacttgcagtcagacatggagttagtggtagaagaaacagaaggggtaacctgcatggtgacagctactgaggggatggataggaaagcaggctgagtccctggggccagtggttaccaaagccaaggagagagcaaggggagcccagtgggcctggccatggactgctctggaattccgagtgtgaactttcagccaagaaggtagtgtgaaaatattactgtgaggttttaaaagtacacaaataacaattgttttttgtaaaaagaaaaaaaaaagttagaaaaagagatatgccaaaaagaagaaagtaaaaaatacatgacttctgtcttctgttaacatattaaaatttattcttttagatttttatgtgtctatatacatgtaaaatatatatgcatccccaaattgtattatactcttttgagacctcacattttttttcacccaagaatataacattaatttctttcctttagaaaagacatgagactaaagaatgtttattgagttgagagtttcccaatcgaggagtatgactctgtataataataaatctaatgttttattagaaattataataaaattagaaatttaatatttggcaggatgtgagttgcctgcctatgtacaccctttattatatgactagacactcttttgtgtggtcatggatatattggcatcttttgaagtgtatcctttttgtttcaggagcttctgtctagatgaatagcaagtgtgacactgataatagtaatcgaatattcctccaagtacaggctccttcctctttctcctggacctttgcacatgctgcctggaaaactcacccacaacctactttccatcctctccttcggctcatccctgctcagccctctttgttgagatatttgccaagccagattctctgagaagcctttcctggcatcttcgtctatataattctgctagttgtttctaaaactatgttgttagtgtatattgtaatcacctatttatgtctgtttgactgtgagcctcttggagatgggaattctctcctatgcattgcggtttccccagcccctagcacactgtctagcccagtattccttctcagtaagtaggtgttgaatgacttacacaatgaatgctaaaagacctggtagacaagaaggaatttcttagcctaaatgaccagatgtggagaagatactcaaacacttcagggtccccaatctggtgatgtcacttgcagtggaatttcatatgaatccagtgtgacagaagttgcctagtcaagttgtaagtcctcttctctgggtcacatgttcaaatacttttaggggacagataatgcaatatttaagatacaggaagtgatgaggactgtggcacactggagagtttggactccaagagtaattaattcagttgaaaaaatcaacagcactctgttgatcaagcaaactttctaggggccctaatccacccgggcctgcagtatgtaattccataactcatgggatgccatcaagagagacaatctacttgattgctaaagggcctttgttttctttggagttccccaggaaggagaaatgtatgtgtgtgcaggggtgaggaggggggagagtgaagaaacaatactatccccctaaaaaggtttgtcagttttcattatgaaagaagatcaaacgtgcccactccagaaatcttggcatatgcagttattttgaagccattcagcattcttcaagatgtcacaatgaaaagagtgatgattttttaaataaaaaattaacatgtttctcttggcaatgggactttctcaccatacttttaagttacatcacttattatgtattcaaaatactgattttttaaaagtatgttccttggagccctgggaacctgcctcaggagctgaggtggctgtggggagggagtatgaagggagctgaatgagttagtgagaatctgggtcttcatatcttttttaaaattgtggctgcttttttctgttctgtataacaactctttttgaaaacagtttcattgttgagttttaaaaccactgacctaaaataaccaccaatttaacgtaagtataacttcattgagtttttttgtattaaaaaaattaaactccattttcttcat

SEQ ID NO: 7188 - DNA, 1457 bp, Homo Sapiens
  XM_001125898
aaggtcagcatagacaaagggcctcagaatcgcgcaggcgcaattgtgccctggttcgccaagatgtcgttcccaaagtataagccgtcgagcctgcgcactctgcctgagaccctcgacccagccgaatacaacatatctccggaaacccggcgggcgcaagccgagcggttggccataagagcccagctgaaacgagagtacctgcttcagtacaacgatcccaaccgccgagggctcatcgaaaatcctgccttgcttcgttgggcctatgcaagaacaataaatgtctatcctaatttcagacccactcctaaaaactcactcatgggagctctgtgtggatttgggcccctcatcttcatttattatattatcaaaactgagagggtaagtattcagaccagatgtttagtatttgagtgataggttcactttctagggaccagctgcagctccttctcttgaagattgccaccagtgcccctcccaccttggggctgtcctctgccttcccttcctctcttcttttatctttattcctttccagcaggagttaaaacagaaagttttcagtcacctttgtctatttttgttagttcatttgttttttaaaaagatgatgtttattgggttaagtattagcagaatacataaatcatttagtacgtttcctgtttgcgtgaattctatttatgttggtcacattttgcaaattaatgttaaaacctattaatactctacggacagagaagcacaagctgcctgtgtggggaatagctgccgtcagcagcctgggtatatgattggagagaaagtcaagctgatctttggcaccaaaccattccacatctggtactaaaccctgagctgcagcccccaggcttgtgttgccactggagcccactcgtctagctttgtctttaactggcccatctgcattcccattagagttcgtgtattttgattatctggtgaatgatctacttaacagaaaggtagtccacattttcccagaaagtgtttgcattttgctttcaatgtatggttttatgggataatatatttctaatgactaaaatgtgagtaagatgtttttgaataggagcattttcttactgtgtctttagttcctcggattactgtttcttcgcacactccctgggctttagacagtgggattgcaattaggtttggagtgtttcattctgtttgtcagttgtacggtgggttgtgccaaaatgcagtttttcttaccttttttatttatttatttttatctaatatagccaactggcagaatatattgtctttaatgtactttttttctgtctttacaggataggaaagaaaaacttatccaggaaggaaaattggatcgaacatttcacctctcatattaagtctggcaatgatgactatatgtattcctgcctaaataaatcatctattaatca

SEQ ID NO: 7189 - DNA, 1236 bp, Homo Sapiens
  XM_001125941
atgaaacatcagagccagctaagagaaaagaaatatttggaggaaattgaaagtgtggaaaaaaagaatgataatcttttaaagggtctacaactgaatgagctcaccatggatgatgatactgccgtgctcgtcattgacaacggctctggcatgtgcaaggccggctttgcaggtgacgatgccccccgggctgtcttcccttccatcgtggggtgccccaggcaccagaacatgatggggggcatgcgtcagatggagtcctatgtgggcaatgaggcccagagcaagagaggcatcctgaccctgaagtaccccatggagcacggcatcatcaccaactgggacgacatggagaagatctggcaccacaccttctacaatgagctgcgtgtggctcccgaggagcaccccatcctgctgaccgaggcacccctgaaccccaaggccaaccgtgagaagatgacccggatcatgtttgagaccttcaacaccccagccatgtacgtggccatccaagccgtgctgtccttgtacacctctggccgtactactggcattgtgatggactctggtgacggggtcacccacactgtgcccatctatgaggggaatgccctcccccatgccaccctgcgcctagacctggctggccgggaactgactgactacctcatgaagatcctcaccgagcgtggctataggttcaccaccatggccgagcgggaaatcgtgcgtgacatcacagagaagctgtgctatgttgccctggacttcgagcaggagatggccacagcggcctccagctcctccctagagaacagctatgagctgcccaacggccaggtcatcaccattagcaacgagcggttccgctgccccgaggtgctcttccagccttgcttcctgggcatggaatcctgtggcatccacgaaactaccttcaactctatcatgaagtctgatgtggacatccacaaagacctgtacaccaacacagtgctatctggtggcaccaccatgtaccctggcattgcccacaggatgcagaaggagatcgctgccctggcgcctagcacgatgaagatcaagattgttgctcctcccaagcgcaagtactccgtgtgggtcggtggctccatcctggcctcgctgtccaccttccagcagatgtggatcagcaagcaggagtatgatgagtcaggcccctccattgtccaccgcaaatgcttctag

SEQ ID NO: 7190 - DNA, 2995 bp, Homo Sapiens
  XM_001126125
atgggcgcttccggtgcggaaccttctggaaagtaccgcgccgccctcccggcgtccccacaaccccgcccgcacctgcgcgcaccggcgctcgcgagcacaagtgacgggactggagcgtggcgcggcaggtggctccacgaaaacgccccttcgcgcaaggctgccccgcgtcctgccgcgccccaggaggcgggacttccgcccccgccgcccggaagcggcagccgggggaagcgtgttcctcgcggagcgccgtcggggccgtgggcgcctgcgcgggccggcgcgggagcaagtggcatggcgttccggcaggcgctgcagctggcggcctgcgggctggccgggggctcggccgccgtgctcttctcggccgtggcggtagggaagccgcgcgcaggcggggacgcggagccacgcccggctgagccgccggcctgggcggggggcgcgcggccgggccccggtgtctgggaccccaactgggacaggcgtcctggtcaggggtttggtagaaggtccctcaattgagacttctctgaaggttttctcatgattagactggagcacgcgccattatgcccagctaattttgtatttttagtgcggcactcaggtgcctttcaccttccaggtcgggagcaggctgaactcactgggctccgcctggcaagcttggggttgaagtttaataaaatcgtccattcgtctatgacgcgcgccatagagaccaccgatatcatcagccggcacctgccaggcgtctgcaaagtcagcacagatctgctgcgggaaggcgcccccatcgagccagacccgcccgtgtctcattggaagccggaagctgtgcagtattacgaagacggagcccggatcgaggccgccttccggaactacatccaccgcgcagatgccaggcaggaggaggacagttacgagatcttcatctgtcacgccaacgtcatccgctacatcgtgtgcagagcactgcagtttcctcctgaaggctggctccggctctccctcaataatggcagcatcacccacctggtgatccgacccaacggccgagttgcgctcaggaccctcggggacacggggttcatgcctcccgacaagatcactcgatcctgagggctccggcctctccttccctctgtcctccctgcacaggccgcacacacttaacgttttgttcccaaggagaccggcggaaagtagaaacctgcaatgctgcatctgggaactgacttgtgaccaggctgagaaggggagagttgggatcagacagcctgacttctctgcagggttttatacctgaccatgaacccccaggatggcgtggggtttaaggtgaaagcgtctcacgcacaagtcaggcctgttgtggggacttgaaagaggcctgacccagaccaccatgttcgcacccacagctgacccgtgctgagggtccaggctccattggcaaagccggtcaggcacgagggcgactgaggcacgtggatgaggagggcacccaggttctgttcacaactcacttcacttcatacatccttttaatttcttaaaaccctcttgtcccttaaatatttgtcaattaaagattttctggctgggcacagtggctcacacctgtattcccagctactcaggaggccagggtgggaggatcacttgagctcaggagttcaagaccagcctggacaaggcaacatagcgagaccctgtctctactaaaaatacagaacttagctgggtgtgtcgtgggcatctagagtcccagctacttgggaggctgaggtgggtggatcacttgggcccgggagctggaggctgcagtgagctgtgattgtgtcactgcactccagcctgggcaagcgagggagacttaaagcaattttttcttttgaaacggagtttcactcttgttgcccaggctggagtgcagtggtgcgatctcggctcaccgcaacctctgcctcctgggttcaagtgattctcctgcctcagctcccgagtagctgggattacagtcgcccaccaccatacctggctaattttttgtatttttagtaaagacagggtttcatggagaaaccaatatagaattgttcaggctggtctcgaactcccaacctcaggtgattcacccaccttggcctcccaaagtgctgggattaaaggtgtgagccatcgtgcctggcctaaaaaatttttttttcttcatctgggtttttgctttgaaaacaagtttctccaaatttacagatttcctgatgatgttgggtctgaactcaccaacttgattaggtctttaggggccgagggactagccagctgcacaggtgactggatgggggaggggcaggtgaggtgggtctacagaggtggcttcgcctttgaccttcatgctggtctcggctgaggtgacacgctagtgacagcccaatagggggttacccttattgagtaaaatacttcagattgacagctcaatcttagtttgcctccagttaatcttttatgcttagggattaaatgtgtggttttttttttgttttttttttttggagacggagtctcgctctgtcacccaggctggagtgcagtggcgcgatctcggctcactgcaacctctgcctcctgggttcaaacgattctcctgcctcagcctcccaagtagctgggattataggcgcccaccaccatgcctggctaattttttatttttagtagagatggggtttcaccgtgttggccaggctggtctcgaactcctgacctcgtgatctacccacctcggcctccccaagtgctgggattacaggcgtgagctagcatgcctggccagggattaaaatattcaaacatgttgtgtgtacccagatatgctgttaatttaggaaaaacagtacaatttctatgaagtggttgtgactattttctgtagtcaatacagttgggatatctgatctatttctctgtctac

SEQ ID NO: 7191 - DNA, 364 bp, Homo Sapiens
  XM_001126202
atgatatacaaggataatatcgtcagaactcaggtcttcaatacatcacagttccctgccctggataaggaacagctacagtcgctgttaaatgtgcctgaaaagcaatttgcaatctttgcattaggcatttcggccgtggaaccccaggctcggaggactgggtgtgagcgctgcccgggagaggctgacctgccgggaccggagtgcccggggacgctgtgcccccacttgcccaacgtgcggaatcggctaagcgcgtcggcctgcgcggggcacaagggacgacgcccgcctttctctctccgagaaggatccccaaacctcactctcttcactcctccccgctaaaaaaaaaaaaaaa

SEQ ID NO: 7192 - DNA, 1209 bp, Homo Sapiens
  XM_001126211
cggcccagggcgcaggcgcgggtgtcggtcccaccgcgcgtcgtcctcgccccggccccggccaatcccttcgaatttggccgaggccgggaaatactagctaatcacggcgcgcgctgttgacgccggccaatgggagctccggaaggctgcgtggagacgccagcggcgggcggtggacagtcatggcggcccggcgcggggctctcatagtgctggagggcgtggaccgcgccgggaagagcacgcagagccgcaagctggtggaagcgctgtgcgccgcgggccaccgcgccgaactgctccggttcccggaaagatcaactgaaatcggcaaacttctgagttcctacttgcaaaagaaaagtgacgtggaggatcactcggtgcacctgcttttttctgcaaatcgctgggaacaagtgccgttaattaaggaaaagttgagccagggcgtgaccctcgtcgtggacagatacgcattttctggtgtggccttcaccggtgccaaggagaatttttccctagattggtgtaaacagccagacgtgggccttcccaaacccgacctggtcctgttcctccagttacagctggcggatgctgccaagcggggagcgtttggccatgagcgctatgagaacggggctttccaggagcgggcgctccggtgtttccaccagctcatgaaagacacgactttgaactggaagatggtggatgcttccaaaagcatcgaagctgtccatgaggacatccgcgtgctctctgaggacgccatccgcactgccacagagaagccgctgggggagctatggaagtgacccaaggctgcccactggagacgcctctccctgcagtcccccgagaggtgggagactcgcggaaggccccgtccccagcagagtccagaccccacaacttcaggagctctttcccggcagcagagatctgcaggctgcctcttctgccccggagctggggtgcactggggacccccgtggtggggaccttggcagtgtggacatgagcagagcgatggagcagtctcctgccctctcccctgtcctgatggcactctgttgtattttcttactgaagttcagtgataactctgagcagtttcattgtgatcactgtaaatggtaatcagttggaattctcctaaatgtcttccagacactagtaaaaaacgacctgaaaattgtt

SEQ ID NO: 7193 - DNA, 593 bp, Homo Sapiens
  XM_001126418
acatagctcccgccaagtcctcggtgccccttgccattttccagccgcgctcccacgagggtcacggcggcggggagaggtggagccgcgagagctcggccgggggccccgcctggtggtcgcggccatgacagcggctcgggacaggctccttttccgcgcccctcccgccggaggtgaggggaagatgtccatgtccgggttcaaggccaaaccgaagttactggcttctatcttccaggagaaccaggagccacagccgcggctcacgccccaccgcaacattaagattacaagtggacacctgagtcagcaggacctggaatcccagatgagagagcttatctacacgactcagatcttgttgtcacccccattattgacaatccaaaggtgcagaaagcactctgacaaatgggccaaggttgctcgggtgattggtttactggcttcgcacaaaactgatctccaggaaaatacacctgttgttgaggccttccctaacagtcccagaactcctacattgcctggtgtgctgacctaaagccctcattaagaccagtaacaaatcaagcctatcttatcaactgaca

SEQ ID NO: 7194 - DNA, 1832 bp, Homo Sapiens
  XM_001126647
actttggtgtctcttccctcgtaccctccccaccccgccaatattatccagcacagagaagcaaacaccagaagcttctctccaactttcagtttttctctaaacttccagtccttctcatactgtgtcctggttataatagttgctgggaccttattctattctgaatccccagcccctaaagaaggcttggtactgacgtgtacagcgtagttacccagtgactttggggaaggcaggaagagtgtggaaaggacaggaggaaggaagggaggggccgtggctccgagctgcctagaaagcggctccagggagccagggcaccgtgagcctggtggttggcagctggagccacgtcggagggggaagtgtcgcagcattctctgcaggcatcacagacctgaggcagtggcctccggagggcactggacagaaacagccatccaagtggctgagtggagggaccctgctcaagtgcagctgcagtggccggggtttccctcaggtagggatcggggcgccttgtcgccgccagccacgtgtggcgtccggtacagtcagcagagtgcagggtgcgggcaccaggaaagggggcgcaggggaactcccgcgggcctcgcgtttgcaaacttctcgcctgggcaggaggcggtcgtgggaaagaaggtggaagagcgagctttttggaactgtgcacgggacagattggacgcacacccctcgggaggcgcgaaggcatggaaaatttgaagcatattatcacccttggccaggtcatccacaaacggtgtgaagagatgaaatactgcaagaaacagtgccggcgcctgggccaccgcgtcctcggcctgatcaagcctctggagatgctccaggaccaaggaaagaggagcgtgccctctgagaagttaaccacagccatgaaccgcttcaaggctgccctggaggaggctaatggggagatagaaaagttcagcaatagatccaatatctgcaggtttctaacagcaagccaggacaaaatactcttcaaggacgtgaacaggaagctgagtgatgtctggaaggagctctcgctgttacttcaggttgagcaacgcatgcctgtttcacccataagccaaggagcgtcctgggcacaggaagatcagcaggatgcagacgaagacaggcgagctttccagatgctaagaagagataatgaaaaaatagaagcttcactgagacgattagaaatcaacatgaaagaaatcaaggaaactttgaggcagtatttaccaccaaaatgcatgcaggagatcccgcaagagcaaatcaaggagatcaagaaggagcagctttcaggatccccgtggattctgctaagggaaaatgaagtcagcacactttataaaggagaataccacagagctccagtggccataaaagtattcaaaaaactccaggctggcagcattgcaatagtgaggcagactttcaataaggagatcaaaaccatgaagaaattcgaatctcccaacatcctgcgtatatttgggatttgcattgatgaaacagtgactccgcctcaattctccattgtcatggagtactgtgaactcgggaccctgagggagctgttggatagggaaaaagacctcacacttggcaagcgcatggtcctagtcctgggggcagcccgaggcctataccggctacaccattcagaagcacctgaactccacggaaaaatcagaagctcaaacttcctggtaactcaaggctaccaagtgaagcctgactataagatgcgctattccacctttcatccctggtatcccatacggcgctag

SEQ ID NO: 7195 - DNA, 3223 bp, Homo Sapiens
  XM_001126650
tttctcgcgtctgccgtacttggtttcgcttcgctagtcccagaggcccagagtggctcgcctggagtctctgtggcgcggtttcctgtacctgccttgggatccggagggaggaagctgggacacccgggagtcaggaaatggactcggtggcttttgaggatgtagatgtgaacttcacccaggaggagtgggctttgctagatccttcccagaagaatctctacagagatgtgatgtgggaaaccatgaggaatctggcctctatagggaaaaaatggaaggaccagaacattaaagatcactacaaacaccgagggagaaatctaagaagtcatatgttagaaagactctatcaaactaaggatggtagtcagcgtggaggaatttttagccagtttgcaaatcagaatctgagcaagaaaatccctggagtgaaactctgtgaaagcattgtatatggagaagtcagcatgggtcagtcatcccttaatagacacatcaaagatcacagtggacatgaaccaaaggaatatcaggaatatggagagaagccagatacacgtaaccagtgttggaaacccttcagttctcaccactcctttcgaacacatgagataattcacactggagagaaactctatgattgtaaggaatgtggaaaaaccttcttttctctcaaaagaattagaagacacatcatcacacacagtggatatacaccatataaatgtaaggtgtgtgggaaagcttttgattatcccagtagatttcgaacacatgaaagaagtcacactggagagaaaccctatgaatgtcaggaatgtggaaaagccttcacttgtatcacaagtgttcgaagacacatgataaagcacactggagatggaccttataaatgtaaggtatgtgggaaaccctttcattctctgagtccatttcgaatacatgaaagaactcacactggagagaaaccttatgtatgtaaacattgtggtaaagctttcgtttcttcaacatcaattcgaatacatgaaagaactcatactggagagaaaccctatgagtgtaagcaatgtgggaaagccttcagttatctcaactcctttcgaacacatgaaatgattcacactggtgagaaaccctttgaatgtaagcgatgtggtaaagcctttagatcttctagttcctttcgactacatgaaaggactcacactggacagaaaccctatcattgcaaggaatgtgggaaagcctattcttgccgtgccagctttcagagacacatgttaacacatgctgaagatggaccaccttataaatgcatgtgggaaagcctttaatgctctgggttcatgtcagatacattaaaatactcactgaagagaagccctatgaatgtaagtaacgtgggaaagcatgaaattctgtcagtgccttttttaatacatgaaagaattctagagagaagccatatacatgtaagtaacatgggaaagctttcaatcattttagttcctttcaaatacatgaaagaactcatcatggagaaaaccaaacaaatgctttttggaaaggaacccatatttgagagaaaccctgggtaaagggtgtaggaaaggttttgtcatcacacaaccctgtcacacatgaatgtgtagtggagagaaccttggtaaatgtaaagagtgtgggagagcctttagtcattttagttccacttgaagccatgaaagaacacacaaaagagaaagctcttgaatataagcaatgtccacacgtttttagccagcccacatgctttcaacaacatgtaagaatgtaccctggatcaaaacactataaatgtgaaaactacaaggaaggttttccattatacttttaaagtcatttgagggctctggctctgtggctttgtgggttaaagtacttgtctggcaaacaggagatgctggatttcaatcccagcagggcctcactagttgaggtattgaatttgaacagatgttttggctctggctgggtgtggtggctcacacctgtaatcccagcactttgggaggctgaggcaggaggatcacttgaggtcaggagtttgagaccagtgtgcaaaacatagcaagacctcatctcagaaaaaaaaaaaaagtcatttgaaaacttctaatacagcaaaatcctataaatgtaagtacttcaaaaagcctcatgcatagcgggtcatgtagtctctagaaaatacataacctgatggaaatgtagaagctatatgtatattttgttaattagtggctcatatttaaaatagttctctgactatggatttcaaatgcttaatctcacaaagaaatgttaaattgatataatcctgtaagtaatctgaaagcaatagtgcatgaatttcataggtagtgttgttttaggtcagtaaataaaatatttgtctttccattttgaaatgtgtttaatccaacaatgaatttaaatgtgtttctcatattcaggtatgttaaattgtatatggttgcttaattgttctgtgattgaggaccactgaaaaataagtcttaataaatgttggtatgaacctacttgcttcatttagcaggttcttgattccctttccacattatatacattccatcatatttattggaacagctccttttttttccttttttcttttttctttcttcttttttctttttgagacagggtctcgctctgtgctctgttgcccaagctggagtacagtggcatgatctcggctcattgcaacctctgccttctgggttcaagtgattctcccaccttagcctcctaggaagctgggactacaggcatgtgccaccacacctggctaattttttgtatttctagtagagatggggtttcaccatgttggccaggctggtagaactcctgacctcaagtgatccacccacctcagcctcctaaagtctgggattacacgtgtgagccatcacacctagcccattttttttttcttggctcaaataattttattttgcttcctattaaagagttgttgttaattctaagtatgtaaagtttatcacagactgtagtctcgtgaattattattttaacctgttgttctttactccttgttatttattctggctgctctttgtataattgattttgggataaggagacagctatgatagaataataaaatctaaaatgggagatgcctttc

SEQ ID NO: 7196 - DNA, 1098 bp, Homo Sapiens
  XM_001126815
atgtatcccttttgcttttcagtgtcttctcagaaacaaccagctgagaaggctacaagtgacgacaaagattctgtttcaaatatagccacagaaataaaggagggaccaatatctgggacagtgtcttctcagaaacaaccagctgagaaggctacaagtgatgagaaagattctgtttcaaatatagccacagaaataaaggagggacaacaatctgggacagtgtctcctcagaaacaatcagcctggaaggttatatttaaaaagaaagtttctcttttgaatattgccacaagaataacgggcggtgggaaatctggaacagtgtcttctcagaaacaaccagcctcaaaggctacaagtgacaagacagattctgctttgaatatagctacagaaataaaggatggactacaatgtgggacagtgtcttctcagaaacaaccagccttgaaggctacaactgacgaggaagattctgtttcgaatatagccacagaaataaaggatggagaaaaatctgggacagtgtcttctcagaaacaaccagccttgaaggctacaactgacgaggaagattctgtttcgattatagccacagaaataaaggacggagaaaaatctgggacagtgtcttctcggaaaaaaccagccttgaaggctacaagtgatgagaaagattctttttcgaatataaccagagaaaaaaaggatggagaaatatctaggacagtgacttctgagaaaccagcaggcttgaaggctacaagtgacgaggaagattctgttttgaatatagccagaggaaaagaggatggagaaaaaactaggagagtgtcttctcggaaaaaaccagccttgaaggctacaagtgatgagaaagattctttttcgaatataaccagagaaaaaaaggatggagaaacatctaggacagtgtcttctcagaaaccaccagccttgaaggctacaagtgacgaggaagattctgttttgagtatagccagagaagaaaaggatggagaaaaatctaggacagtgtcttctgagcaaccaccaggcttgaaggtaatgaaactgtcatttatgttgtga

SEQ ID NO: 7197 - DNA, 1835 bp, Homo Sapiens
  XM_001127234
actctattgcatgattctcctgcctacatcagaagacgtttataagcctattttaaaggataccagttggaatctctcttttattaatcaccaagagaaccatgaacaagctgtttatcatttgactcatcatttaatcttgatttccagcttctcacacttgaaagaagacataatacatttctcacaggattctgggactattaactgaacttatgtgtgtaaaaggaattcatacaatgaaagcactagaaataattattatacttataaccattgtatttttacatgtttaaaatatagccataattagcctactcaaatccaagtgtaaaagtaaaatgatttgctttcgttttgttttccttgcttaggggatcatggacattgaagcatatcttgaaagaattggctataagaagtctaggaacaaattggacttggaaacattaactgacattcttcaacaccagatccgagctgttccctttgagaaccttaacatccattgtggggatgccatggacttaggcttagaggccatttttgatcaagttgtgagaagaaatcggggtggatggtgtctccaggtcaatcatcttctgtactgggctctgaccactattggttttgagaccacgatgttgggagggtatgtttacagcactccagccaaaaaatacagcactggcatgattcaccttctcctgcaggtgaccattgatggcaggaactacattgtcgatgctgggtttggacgctcataccagatgtggcagcctctggagttaatttctgggaaggatcagcctcaggtgccttgtgtcttccgtttgacggaagagaatggattctggtatctagaccaaatcagaagggaacagtacattccaaatgaagaatttcttcattctgatctcctagaagacagcaaataccaaaaaatctactcctttactcttaagcctcgaacaattgaagattttgagtctatgaatacatacctgcagacatctccatcatctgtgtttactagtaaatcattttgttccttgcagaccccagatggggttcactgtttggtgggcttcaccctcacccataggagattcaattataaggacaatacagatctaatagagttcaagactctgagtgaggaagaaatagaaaaagtgctgaaaaatatatttaatatttccttgcagagaaagcttgtgcccaaacatggtgatagattttttactatttagaataaggagtaaaacaatcttgtctatttgtcatccagctcaccagttatcaactgacgacctatcatgtatcttctgtacccttaccttattttgaagaaaatcctagacatcaaatcatttcacctataaaaatgtcatcatatataattaaacagctttttaaagaaacataaccacaaaccttttcaaataataataataataataataaaaaatgtattttaaagatggcctgtggttatcttggaaattggtgatttatgctagaaagcttttaatgttggtttattgttgaattcctagaaaagttttattggtagatgagtaaataaaatattgtaaaaaaacttattgtctataaagtatattaaaacattgttggctaatataatttgaaaaaaagtggttttttggaagacttaggatattatggtgctacataatttttcctcgatgctctcttcctctcatctttcttgtctcttaaattactttacttccttgcacactttgccatacaagaatgaacatgagcttttcttgtgtagatctgagttgaaatcctgtggacactgggcg

SEQ ID NO: 7198 - DNA, 3299 bp, Homo Sapiens
  XM_001127274
atgtatatccgtattataagatgtcagcccccaccgcgcacgcccccgcccccgtcagctctgctgggctgcagaggaggggggacgaggtggcacagggtggctctgcggcagtgtagccgcttcgtgctgtcggtatctccacaagtccagaagctggcttcaccggggaaagaaggattgtccaaatgtggaagatgcaagcaggcattttactgcaatgtggagtgtcagaaagaagattggcccatgcacaagctggaatgttctcccatggttgtttttggggaaaactggaatccctcggagactgtaagactaacagcaaggattctggccaaacagaaaatccacccagagagaacaccttcggaaaaattgttagctgtgaaggagtttgaatcacatctggataagttagacaatgagaagaaggatttgattcagagtgacatagctgctctccatcacttttactccaagcatctcgaattccctgacaatgatagcctcgtagtactctttgcacaggttaactgtaatggcttcacaattgaagatgaagaactttctcatttgggatcagcgatatttcctgatgttgcattgatgaatcatagctgttgccccaatgtcattgtgacctacaaagggaccctggcagaagtcagagctgtacaggaaatcaagccgggagaggaggtttttaccagctatattgatctcctgtacccaacggaagatagaaatgaccggttaagagattcttatttctttacctgtgagtgccaggagtgtaccaccaaggacaaggataaggccaaggtggaaatccggaagctcagcgatcccccaaaggcagaagccatccgagacatggtcagatatgcacgcaacgtcattgaagagttccggagggccaagcactataaatcccctagtgagctgctggagatctgcgagctcagccaggagaagatgagctctgtgtttgaggacagtaacgtgtacatgttgcacatgatgtaccaggccatgggtgtctgcttgtacatgcaggactgggaaggagccctgcaatatggacagaaaatcattaagccctacagtaagcactatcctttgtactccctcaacgtggcctccatgtggttgaagctagggagactctacatgggcctggaacacaaagccgcaggggagaaagccctgaagaaggccattgcaatcatggaagtagctcacggcaaagatcatccatatatttctgagatcaaacaggaaattgaaagccactgaaactatgcagcatttcagttttcatttaaacacttagttcagaaaccttaaaggatttgaatatttcaaattgcacacgtcactccagcatctctgtaaaataattggaatgaaaatacttcttgcacttaaacactgcacatgccgtactttgaggttagtctgaatcttgaactttaataccaaattaattttgaatgcttttgtttcctaagagataatggcatggtttcatatgttatactttggacagagttttaaaaatggaattattttttctttcatgcctcttgtaatgttctgaacaaacttgaatgatgaaagtattaaagagatatcagtatttgaggtttgtattttcttctgtctctggggaggatttctcagtggtggtgggagcccagtcttggagtgaaagtgacacctgctgtccataattcagcaagctcaagtcttctccatgggactggggtcgggcagcctctttattctgcagttgctcttgtggggctgtgcctgtggaggaagaaaatgggaagaaagagaaaaaggtacacgaaggaaagaaaactatcatctatctgtggtggaggaacagtccagtgacccaagtgccctccagcaggcgaggttttgaatctgttctctggtgcctggtattccttcagtgtgtaaaggtgcttagtgcgtgctttgctttcttggcttttctgtccccatctgtctgaaagcagacttgccatctctcattctgttgattgttctgtgcagtactctcctttttggaaaaactccagggtatgcttgggaaggaaaaaaatttttttccttaccaaccaacgctgtgttgttgagtaaacactgatctctacccacacagacaacaggaatccagctttctgcagccccacagcctagacagcagcaacctggggagttgtttgttagcaaccattgcacagaaggacgcagcacacgttcctgagtgcaggggtgttactcttagaaaagcgtcttgtagtcgaaagagaggaacttccccactggttaataagtaaagcctgttgaaatttacatgtcaattacctttcatagtcatggtccgaaaacagctagaacagctgtaaatctggtacattttccttccctcctcatctacacgcacccacatcttcacacacactcatgcccctctttcacacgcagtttgctgcacacagtgggatttagcagatagaatgcattctcttgtcctgtgtagtccaataagacatttactgaacacctggtactatctatgctaaatgctctgaatagctctctaggtgcaaagagaagagtaaggcatggtcccagatcagtggaacttaggttttaagaatgttcatttactatacattctgtgacgaagcctaaaataaacttagcctaccatctctataggttttataaaatttgcaaaagtaatcctttctcagtaaattcaagtaatggaaatgtatatgaaaaaagtaaacttctttgttcttcaccagtcccactgcgtggagctaactgccataaacagtttgctttatatggtcccaggtttttccattcctggatgatgatgtagctatataaatagatttagaagaacaaagacaggatggtactgacataggattttgtaacgtgcttctccaaacgaacaaaatggatctctttgcatttcagcacttacagatttgcctcattctatttagaggcagaatattgcattggatgcatgtcatcatggactcggtacttctatttatggacaggaggttttttttcccagtttgctgctattacaaacaatgccacaatgaatgatctgaaacataaaactttgcgttgtgtggtagcattttggggaatagattcctggaagtgcaatttcaagatccaatagtgggaatatttttaaaatttgaataaatatagccacatttccttttgtaaaaaaaaaaaaaaaa

SEQ ID NO: 7199 - DNA, 372 bp, Homo Sapiens
  XM_001127442
agaacctgtcccaagtctccatactgagcatcataaggatgtatattttctggccaagtggcaatgatgagttttcagagaggatgacactgaggttctgggacgacctgtgtctcacccaaggctgcctgggtaaaggggagcagaaacaggtagagggagctggtctcctgaatccgatccagccccgttttcctgccaagccctgggatgaggacctgagacgccttctcccacccactgctctgcgcattgcacagaagagcggctgctggtaaagttctgggagttctgacacatgcacgccacagaaacacaggactgggggttgtcaccgctatcaacgttaatgacaataaagggaaaacagca

SEQ ID NO: 7200 - DNA, 2278 bp, Homo Sapiens
  XM_001127464
atgggccaaaatatgggcttaaacaaaggttgtgggagctcagaaaaggagcaactcactctgcctgaaagagtcatggagggctccacggaaaaagcaacatttgtgcaggaggagattagaacacagaggaggaggatagcagcactccagatgaagggaaggaaatcaaagttggcccgagatgaccaaattcacattctcaagcaacaccgacgtaaagaactggaaacacggcaaaaacaatatcgatggatggagtggaaccctggcttccccttgagcatcgatgccaaatgccacaaggatttaccccgtgatatccagtttgatagtgaaaaaggagtggactttgttctgaattactccaaagcgatggagaacctgttcatcaaccgcttcatgcacatgttccagtcttcttggaatgacttcgccgactttgagaaaatctttgtcaagatcagcaacactatttctgagcgggtcatgaatcactggcaggaagacctgatgtttggctaccagttcctgaatggctgcaaccctgtgttgatccggcgctgcacagagctgcccgagaagctcccggtgaccacggagatggtagagtgcagcctggagcggcagctcagcttggagcaggaggtccagcaagggaacattttcatcgtggactttgagctgctggatggcatcgatgccaacaaaacagacccctgcacactccagttcctggccgctcccatctgcttgctgtataagaacctggccaacaagattgtccccattgccatccagctcaaccaaatcccgggagatgagaaccctattttcctcccttcggatgcaaaatacgactggcttttggccaaaatctgggtgcgttccagtgacttccacgtccaccagaccatcacccaccttctgcgaacacatctggtgtctgaggtttttggcattgcaatgtaccgccagctgcctgctgtgcaccccattttcaagctgctggtggcacacgtgagattcaccattgcaatcaacaccaaggcccgtgagcagctcatctgcgagtgtggcctctttgacaaggccaacgccacagggggcggtgggcacgtgcagatggtgcagagggccatgaaggacctgacctatgcctccctgtgctttcccgaggccatcaaggcccggggcatggagagcaaagaagacatcccctactacttctaccgggacgacgggctcctggtgtgggaagccatcaggacgttcacggccgaggtggtagacatctactacgagggcgaccaggtggtggaggaggacccggagctgcaggacttcgtgaacgatgtctacgtgtacggcatgcggggccgcaagtcctcaggcttccccaagtcggtcaagagccgggagcagctgtcggagtacctgaccgtggtgatcttcaccgcctccgcccagcacgccgcggtcaacttcggccagtacgactggtgctcctggatccccaatgcgcccccaaccatgcgagccccgccaccgactgccaagggcgtggtgaccattgagcagatcgtggacacgctgcccgaccgcggccgctcctgctggcatctgggtgcagtgtgggcgctgagccagttccaggaaaacgagctgttcctgggcatgtacccagaagagcattttatcgagaagcctgtgaaggaagccatggcccgattccgcaagaacctcgaggccattgtcagcgtgattgctgagcgcaacaagaagaagcagctgccatattactacttgtccccagaccggattccgaacagtgtggccatctgagcacactgccagtctcactgtgggaaggccagctgccccagccagatggactccagcctgcctggcaggctgtctggccaggcctcttggcagtcacatctcttcctccgaggccagtacctttccatttattctttgatcttcagggaactgcatagattgatcaaagtgtaaacaccatagggacccattctacacagagcaggactgcacagcgtcctgtccacacccagctcagcatttccacaccaagcagcaacagcaaatcatgaccactgatagatgtctattcttgttggagacatgggatgattattttctgttctatttgtgcttagtccaattccttgcacatagtaggtacccaattcaattactattgaatgaattaagaattggttgccataaaaataaatcagttcatttaaaatgg

SEQ ID NO: 7201 - DNA, 3505 bp, Homo Sapiens
  XM_001127568
atgcagccattgtgggcacctgttcctcccgcgacctttgtgcccacgtctctccctccagtacctactgcacgaccccccacgtccgcctcctgccattgccagcaggtgccttgcgccggtttagaagtcgcgttgcccggcaacagaacaatctgctggcttagcctttggccaagttggcagctggacgaggacgctcagagcccagctcttgagagttcaagtatccgacagttccccactgctcccaggagcggttacccgggcactctgtgcccctcattcctgtaccacagtaagccagtgctgtgtgctccgagttccagggcatcccccagctcagccactacactgagcacaaggactctgtggggcccaggagcaggtagtcacccctttggggtccacaacacccggctgtccccagacttgtgtccagggaagatagtgttgagggccctcaaggagagcggggcagggatgcctgagcaggacaaggaccccagagtccaagaaaatcctgatgatcagagaacggtccccgaggtcaccggggatgcacggtctgcattttggcccctgcgggacaatggaggcccctctccctttgtgcccaggcccgggcctctgcagacagacctccacgcccagagctcagaaatcagatataaccacacatcccagacatcctggacgagctcgagcaccaaacgaaatgccatctccagctcctacagctccacgggaggcttgccggggctaaagcagaggagggggccagcctcatcccgctgccagctgaccctcagttactcaaagacagtgagtgaggacaggcctcaggctgtctcttcgggtcacacacggtgtgaaaagggggcagatacagcaccagggcagacaatcgccccaacgggtggctcccccagatcccaggactctaggccccgtagacgcaagattcccctgctgccacgcaggcgaggggagcctttgatgctgccacctcccttagagctggggtaccgggtcacggctgaagacctgcacctggaaaaagagacggcattccagcgcatcaacagtgcactgcacgttgaggacaaggccatcccggactgcagaccctcacggccttcccacactttgtcctcacttgcaacagggacttcgggtgggcctcccgtttctaaagcacccactatggatgcacagcaggacagacccaagtcccaagactgcctgggcctactggcccccctagcatctgctgcagaggtctcctctacagctcccgtgtctgggaagaagcacagaccaccaggacccctgttctcctcctcagatccccttcctgccacctcttcccactccggggactcagcccaggacacctcgctgattcctgcccccttcacacctgcaagcagggatgccggcatcagaagaatgtttcgtgttcgaaattgtttgaggggtttgggtttatttttgttggttttttcttttttttttttgcttacgtgggcatccttcagcttttaataatctgaaaaattctatttacccattgtcaatgtgtataaattaatctcagtcaattttatacaataaagggtgaacttttatccatcaaacaataatttaacaaaaaatgtaccggaagaagaatgttcattacaaatataggaaacataaatattaccaaatattggcaagcactgaaatgttcagaaatataagtctattacagttatagctctctcaagcaaaaaaacagcagagaaaaacttagtttacctgaggggctatttatttacttagggatttgttaaaaggtcaaatggggtcacacagaatactaagaagagctgttcacccaggcctcactaagaactcttcttcatgcagtagctatataggaatatgacaactgctcctacgacccaaagaggaactacagcaactactctttagcatctgttgctcccaactctgctttgcaattatatgactcaagcattctggctccgttaactattactgctgttactcccaagtaaattccctctaaaaaataaaaatttttaaagctgtaatttaagctctctgctgcctcatgacttcaattccatcagagttacgcattgtttcctctgtacatctttgctctgcttccattgctaattccctagtaaagtgttgtatattcaaagttccaaagaaacagaatatccaagacatcaccaatcatccaaaacacagtgtaggaggccacagttaagagaagcaagaccattagctctttttataggctcgagaacaacaggatgctttggtcctgtatcagcaggacgctttttgggtagatcctactgccaccctactatcgggtagatcctactgtcaccctagctatgggcacatgtcagagtcccatgtaataaaggagacaaaaggaaaccaccacaagtataaactaagaaaagtactccaaggtttctaagaatggagctgtataactcactttgccccgtttgttacttctccacggtacttaccaccacctattacatatattttgtttatagtcagtcttcccccattagaatgaaagttccgtgaggataggactatacagtcagccctcagtatccatgggggactggtttcaggatctcctgagggtaacaaaggatactcaagtccctgatataaaatgacatagtatttgcacatcacctttgcacatcctcccatatacttcatatcaactctagatcactcataatatccgatgtaaatgtcatgcaaatagttattgtactatattgtgtaaggaataaggacaagaaaaaagtctgtacatgttcagtacagacgcaatttttttttccaatatttccaatccttggttgccttaacggatgtagaacccaggaataagttctggtgtcctattgcatagtaggatgagtatagttaacaataacatattatatatttgaaaatagccagaagagtagattttgaattttctccctacagaaaaatcattatgcaaattaccctgatttgatcattacacattgagtacatgtattaaaacatcacattctaccccatatatatgtacagttattatgtgtccataaaaatttaatgtcaatgtgtgaaataaaatgaaaaaataaaaatttttaaagctgtaattatctccatctggtaggaatatatacaatctgaaataaaaaatatatttgtaattgttaggacaaaatagattatacattaagtctgcaaattataaattataaaattctcacagaacctgaaaaattattgatactgttaaatatttaaaaagctgtccttggagagaaagaaacctatcagatttacatcaacaagtgtaatatgtcagcctattaccatctgctacagactgcatgtttgtgttccctcaaaattcatatgataggcccggcgcggtggctcatgc

SEQ ID NO: 7202 - DNA, 5352 bp, Homo Sapiens
  XM_001127632
atggccctgaaaatagttctgccaagctgcgtgcagtggacacttcacggctggcacaggagagatcacaaggccttgctcaatttcatcaaaagtgttaaagcgactcagcagattgtgaagcacaagtggaagctgataattggtgtttcttacaaatcaacggcttgtctccacacatcaagatgtgaatttcttcggagtaagaaatcctcagaggaaattacccagtatattcaaagctacaagggatttgttgacataacgggagaacattttgtgaattcctgggtccagagagaattacctatggcatcagcttattgcaatgacagcatctttgcttacgaagaactacggctggactcttttaaggactggccccgggaatcagctgtgggagttgcagcactggccaaagcaggtcttttctacacaggtataaaggacatcgtccagtgcttttcctgtggagggtgtttagagaaatggcaggaaggtgatgacccattagacgatcacaccagatgttttcccaattgtccatttctccaaaatatgaagtcctctgcggaagtgactccagaccttcagagccgtggtgaactttgtgaattactggaaaccacaagtgaaagcaatcttgaagattcaatagcagttggtcctatagtgccagaaatggcacagggtgaagcccagtggtttcaagaggcaaagaatctgaatgagcagctgagagcagcttataccagcgccagtttccgccacatgtctttgcttgatatctcttccgatctggccacggaccacttgctgggctgtgatctgtctattgcttcaaaacacatcagcaaacctgtgcaagaacctctggtgctgcctgaggtctttggcaacttgaactctgtcatgtgtgtggagggtgaagctggaagtggaaagacggtcctcctgaagaaaatagcttttctgtgggcatctggatgctgtcccctgttaaacaggttccagctggttttctacctctcccttagttccaccagaccagacgaggggctggccagtatcatctgtgaccagctcctagagaaagaaggatctgttactgaaatgtgcatgaggaacattatccagcagttaaagaatcaggtcttattccttttagatgactacaaagaaatatgttcaatccctcaagtcataggaaaactgattcaaaaaaaccacttatcccggacctgcctattgattgctgtccgtacaaacagggccagggacatccgccgatacctagagaccattctagagatcaaagcatttcccttttataatactgtctgtatattacggaagctcttttcacataatatgactcgtctgcgaaagtttatggtttactttggaaagaaccaaagtttgcagaagatacagaaaactcctctctttgtggcggcgatctgtgctcattggtttcagtatccttttgacccatcctttgatgatgtggctgttttcaagtcctatatggaacgcctttccttaaggaacaaagcgacagctgaaattctcaaagcaactgtgtcctcctgtggtgagctggccttgaaagggtttttttcatgttgctttgagtttaatgatgatgatctcgcagaagcaggggttgatgaagatgaagatctaaccatgtgcttgatgagcaaatttacagcccagagactaagaccattctaccggtttttaagtcctgccttccaagaatttcttgcggggatgaggctgattgaactcctggattcagataggcaggaacatcaagatttgggactgtatcatttgaaacaaatcaactcacccatgatgactgtaagcgcctacaacaattttttgaactatgtctccagcctcccttcaacaaaagcagggcccaaaattgtgtctcatttgctccatttagtggataacaaagagtcattggagaatatatctgaaaatgatgactacttaaagcaccagccagaaatttcactgcagatgcagttacttaggggattgtggcaaatttgtccacaagcttacttttcaatggtttcagaacatttactggttcttgccctgaaaactgcttatcaaagcaacactgttgctgcgtgttctccatttgttttgcaattccttcaagggagaacactgactttgggtgcgcttaacttacagtactttttcgaccacccagaaagcttgtcattgttgaggagcatccacttcccaatacgaggaaataagacatcacccagagcacatttttcagttctggaaacatgttttgacaaatcacaggtgccaactatagatcaggactatgcttctgcctttgaacctatgaatgaatgggagcgaaatttagctgaaaaagaggataatgtaaagagctatatggatatgcagcgcagggcatcaccagaccttagtactggctattggaaactttctccaaagcagtacaagattccctgtctagaagtcgatgtgaatgatattgatgttgtaggccaggatatgcttgagattctaatgacagttttctcagcttcacagcgcatcgaactccatttaaaccacagcagaggctttatagaaagcatccgcccagctcttgagctgtctaaggcctctgtcaccaagtgctccataagcaagttggaactcagcgcagccgaacaggaactgcttctcaccctgccttccctggaatctcttgaagtctcagggacaatccagtcacaagaccaaatctttcctaatctggataagttcctgtgcctgaaagaactgtctgtggatctggagggcaatataaatgttttttcagtcattcctgaagaatttccaaacttccaccatatggagaaattattgatccaaatttcagctgagtatgatccttccaaactagtaaaattaattcaaaattctccaaaccttcatgttttccatctgaagtgtaacttcttttcggattttgggtctctcatgactatgcttgtttcctgtaagaaactcacagaaattaagttttcggattcattttttcaagccgtcccatttgttgccagtttgccaaattttatttctctgaagatattaaatcttgaaggccagcaatttcctgatgaggaaacatcagaaaaatttgcctacattttaggttctcttagtaacctggaagaattgatccttcctactggggatggaatttatcgagtggccaaactgatcatccagcagtgtcagcagcttcattgtctccgagtcctctcatttttcaagactttgaatgatgacagcgtggtggaaattgccaaagtagcaatcagtggaggtttccagaaacttgagaacctaaagctttcaatcaatcacaagattacagaggaaggatacagaaatttctttcaagcactggacaacatgccaaacttgcaggagttggacatctccaggcatttcacagagtgtatcaaagctcaggccacaacagtcaagtctttgagtcaatgtgtgttacgactaccaaggctcattagactgaacatgttaagttggctcttggatgcagatgatattgcattgcttaatgtcatgaaagaaagacatcctcaatctaagtacttaactattctccagaaatggatactgccgttctctccaatcattcagaaataaaagattcagctaaaaactgctgaatcaataatttgtcttggggcatattgaggatgtaaaaaaagttgttgattaatgctaaaaaccaaattatccaaaattattttattaaatattgcatacaaaagaaaatgtgtaaggcttgctaaaaaacaaaacaaaacaaaacacagtcctgcatactcaccaccaagctcaagaaataaatcatcaccaatacctttgaggtccctgagtaatccaccccagctaaaggcaaacccttcaatcaggtttatacagcaaaccctccattgtccatggtcaacagggaaggggttggggacaggtctgccaatctatctaaaagccacaatatggaagaagtattcaatttatataataaatggctaacttaacggttgaatcactttcatacatggatgaaacgggtttaacacaggatccacatgaatcttctgtgggccaagagatgttccttaatccttgtagaacctgttttctatattgaactagctttggtacagtagagttaacttactttccatttatccactgccaatataaagaggaaacaggggttagggaaaaatgacttcattccagaggcttctcagagttcaacatatgctataatttagaattttcttatgaatccactctacttgggtagaaaatattttatctctagtgattgcatattatttccatatcatagtatttcatagtattatatttgatatgagtgtctatatcaatgtcagtgtccagaatttcgttcctaccagttaagtagttttctgaacggccagaagaccattcgaaattcatgatactactataagttggtaaacaaccatacttttatcctcatttttattctcactaagaaaaaagtcaactcccctccccttgcccaagtatgaaatatagggacagtatgtatggtgtggtctcatttgtttagaaaaccacttatgactgggtgcggtggctcacacctgtaatcccagcactttgggaggctgaggcgggcgaatcatttgaggtgaggaattcgagaccagcctggccagcatggtgaaaccccatctctactaaaaatacaaaaattagccaggtgtggtggcacatgcctgtagtcccagccactagggcggctgagacgcaagacttgcttgaacccgggaggcagaggttgcagtgagccaagatggcgccactgcattccagcctgggcaacagagcaagaccctgtctgtctcaaaacaaaaaacaaaaccacttatattgctagctacattaagaatttctgaatatgttactgagcttgcttgtggtaaccatttataatatcagaaagtatatgtacaccaaaacatgttgaacatccatgttgtacaactgaaatataaataattttgtcaattatacctaaataaaactggaaaaaaatttctggaagtttatatctaaaaatgttaatagtgcgtacctctaggaagtgggcctggaagccattcttacttttcagtctctcccattctgtactgttttttgttttactttcgtgcctgcattatttttctatttaaaacaaaaataaatctagtttagcactaa

SEQ ID NO: 7203 - DNA, 2556 bp, Homo Sapiens
  XM_001127710
cccgcggggtcggacgacacggctggcggatggcgtccctcctctctaccctccccctcccgccgccgccggtggcgactctcccctcggcccgtcacccgtgctcgcgggtgaccgtcctcggcgcggcctccctggagccgccttcgcctgacgcccctcttcctcccgccctcgacgcgcatcccggcccccggccccgcgggcgcccctgtcgccggggttcgcctgtcggggctgcgcgcgctcctgcccttctcggggctttgggccgcggcgccgtcgcgcgcccgcggccccggcctctccctggatcgcgctctccccctccctccctcgcgcgccccctctcccgttactcggcccccccaccggcgcgcgtgcgcacttcgcctcccgtcgggagagtgcgccacaagggctcctgagctctcacccccatctctgggctttgcctccccctccttctcgcccattccatgaatttctgccccccgctacccccccgcgagcgagtaggtccaccggctcctttccccatctagcaggaacaagtaggtggggattattatccacaaaagggactagacattgtgttctgggtcccacaactcatcataaagaggtggttatagttcccatcaggagccgtgggtaggggactgtgcgtccagcagcacccgaggctcttcggcgccagaggctctaaggtgcgagcgtgtccccagggtgctcagaggttctttggagtgctgtggcctcggaatgtgagcaccctcccatcctaccctccccttcgccggcgatcttccagttacataagtggagtgggacatagtaggtaacgggctctcatcgccctggagcgctcgggatcaccggtaccagatggggcaagttcatcgcgacgctgtggctcctgttaattgtgcctgaaaggttatcctctgttcagtttggtcatgaccgaatcacccaaactgaaactcagatgacttttatatggcagtggcaatgtttctgtggttttgcactaaagacttaaggtcattatgaagagtgtaaaaggattgctgtcgcaggggagaccgtttatgacattgctaagtatggaccccgagggggaaaaagctcattctggaattgctctgtggcggttgcttctgttgcgagtgtgttcgggtgtgggttggtcacagcagaaatgggctccaccacaaaattgatattcctgactcatggtcaggcagatgtgtgcttctggttatttttccaggaacaggaatgggctctgccgagcctttcacacgttgtgtctctgctgtgcgggatcagtaccccagactgtgagataacaggatcgaattcaggggttggttggtgatccaggaaccatacctacttggatgtgatactgagtggcctagacgttgtaggactctcataagttttagacattttgttatactgtaaaaatgaagcatatacggcctcagtagtaacattgcactaataggtaattattactctagagaattttgggttccatggctggaatgttcatcagtatctcagcaatttcagttaataaccagattaagctgacctcttgagtcttttgaaatctgctgggtccctataataagacagggtctggattttttaatcttttgggaatttccaccaaggatttagggaaataggcttttatgggcttttcaggatttctatttcaaatcccaatgaggaagtctaggaaacacttgcttttattttcttgcctgaatatgtcagaaccttaaatcacccaatcaatctagaagtactacagttgattaaagtaagtcaccacaggtcacccattcgtggcaggtcagctaggtggctgatcactggaatacagtcatatccccaggcatacacacgagcctcacttgacgatcccaaagtttgtacatctgagcttgagacgtgacaagttgaggtctctgctttgttcttcatagttggcagtttgtctcctcgggtgcccctccggttagctgtttatcatacgtctagccctatcaacagtgcaggcagcttccagagtatagttttctctgcaaagtgcctggtggaggggtacctccttttccattgtcctaatggctccactgggcttccataccagccctttccagtgtcttaacagctcaaagaaacccatctgtggctttcttgttagcactggcctatcacaccttcctattgcctgttaactaaaattttgcctggaatgctttaagcttagagtactgggtctttgtttcacccgattgataggagagtgtcatgcagtcagccgaactccgacttctgtgctgtttaaatccttaggtaggtctggggcaaggcacaaaccactgtgtattcaaagggttatggtgcttgcattctgtgtgtatatgtttgtaatttccaaccagagtcgtttcccgtgcctgccctgcctctgtgcaatctagtctagtagggtagggaggcaagctgtggagtttgaaaaaaaaaaaaaaa

SEQ ID NO: 7204 - DNA, 2617 bp, Homo Sapiens
  XM_001127869
atgggcgctgtgctgcctggggtgggttccagggttctggggagagaggatgggggctgcattgcccagggttactccaccgagctggccctctggaaaggggtgcagagcctggtcctgggggccccccgctaccagcacaccgggaaggctgtcatcttcacccaggtgtccaggcaatggaggatgaaggccgaagtcacggggactcagatcggctcctacttcggggcctccctctgctccgtggacgtagacagcgacggcagcaccgacctggtcctcatcggggccccccattactacgagcagacccgagggggccaggtgtctgtgtgtcccttgcccagggggtggagaaggtggtggtgtgatgctgttctctacggggagcagggccacccctggggtcgctttggggcggctctgacagtgctgggggatgtgaatggggacaagctgacagacgtggtcatcggggccccaggagaggaggagaaccggggtgctgtctacctgtttcacggagtcttgggacccagcatcagcccctcccacagccagcggatcgcgggctcccagctctcctccaggctgcagtattttgggcaggcactgagcgggggtcaagacctcacccaggatggactggtggacctggctgtgggggcccggggccaggtgctcctgctcaggaccagacctgtgctctgggtgggggtgagcatgcagttcatacctgccgagatccccaggtctgcgtttgagtgtcgggagcaggtggtctctgagcagaccctggtacagtccaacatctgcctttacattgacaaacgttctaagaacctgcttgggagccgtgacctccaaagctctgtgaccttggacctggccctcgaccctggccgcctgagtccccgtgccaccttccaggaaacaaagaaccggagtctgagccgagtccgagtcctcgggctgaaggcacactgtgaaaacttcaacctgctgctcccgagctgcgtggaggactctgtgacccccattaccttgcgtctgaacttcacgctggtgggcaagcccctccttgccttcagaaacctgcggcctatgctggccgccgatgctcagagatacttcacggcctccctaccctttgagaagaactgtggagccgaccatatctgccaggacaatctcggcatctccttcagcttcccaggcttgaagtccctgctggtggggagtaacctggagctgaacgcagaagtgatggtgtggaatgacggggaagactcctacggaaccaccatcaccttctcccaccccgcaggactgtcctaccgctacgtggcagagggccagaaacaagggcagctgcgttccctgcacctgacatgtgacagcgccccagttgggagccagggcacctggagcaccagctgcagaatcaaccacctcatcttccgtggcggcgcccagatcaccttcttggctacctttgacgtctcccccaaggctgtcctgggagaccggctgcttctgacagccaatgtgagcagtgagaacaacactcccaggaccagcaagaccaccttccagctggagctcccggtgaagtatgctgtctacactgtggttagcagccacgaacaattcaccaaatacctcaacttctcagagtctgaggagaaggaaagccatgtggccatgcacagataccaggtcaataacctgggacagagggacctgcctgtcagcatcaacttctgggtgcctgtggagctgaaccaggaggctgtgtggatggatgtggaggtctcccacccccagaacccatcccttcggtgctcctcagagaaaatcgcacccccagcatctgacttcctggcgcacattcagaagaatcccgtgctggactgctccattgctggctgcctgcggttccgctgtgacgtcccctccttcagcgtccaggaggagctggatttcaccctgaagggcaacctcagctttggctgggtccgccagatattgcagaagaaggtgtcggtcgtgagtgtggctgaaattacgttcgacacatccgtgtactcccagcttccaggacaggaggcatttatgagagctcagacgacaacggtgctggagaagtacaaggtccacaaccccacccccctcatcgtaggcagctccattgggggtctgttgctgctggcactcatcacagcggtactgtacaaagttggcttcttcaagcgtcagtacaaggaaatgatggaggaggcaaatggacaaattgccccagaaaacgggacacagacccccagcccgcccagtgagaaatgatcccctctttgccttggacttcttctcccccgcgagttttccccacttacttaccctcacctgtcaggcctgacggggaggaaccactgcaccaccgagagaggctgggatgggcctgcttcctgtctttgggagaaaacgtcttgcttgggaaggggcctttgtcttgtcaaggttccaactggaaacccttaggacagggtccctgctgtgttccccaaaggacttgacttgcaatttctacctagaaatacatggacaatacccccag

SEQ ID NO: 7205 - DNA, 1523 bp, Homo Sapiens
  XM_001127871
atgtgttcagggcctactgttccaaaatggaagtacagagaagagtacaccagatgtctatctgcttccagggaaaacctgaaccatgaggagaattggtggctgagaaaccctggcccccagcatgagaagcggactctgtttggcgacatggtgtgcttcttgtttataactcccctggccaccatctcgggctggctgtgcctgcggggcgccgtggaccacctgcactttagtagtcggctggaagccgtcggactgattgcactcactgtcgcactcttcactatttacctcttttggacactagtgtcatttaggtaccactgtcgattgtacaacgagtggcgtcggaccaatcagagggtgattctcctcattccaaagtctgtcaatgtaccttctaaccagccgtccttgctgggcctccattcggtcaagaggaactcaaaggagacagttgtttgatgtttgtatggttggttggttgtttgattcattgtttggggtttggaagtgtctgcactggggtcatgcactgagcgacccccaagcccttccttaagcctgtgggtctaagaacatccagagcatattagcacatcactccaagcaacaacctccgccagaagaaagcaaatgctgttttacttcaaatgatggatgctgcaatcatatgatatttgctaagctgccaaacatgtttatttagcagatactgtatggaattttctgaacacctctttaacgtatgaggaaggttgtcctgctacggatgcaattcaattcttccttttttattactatttcaaacacacacacatatatatatatattaaacttagatgataatcaaaatcaaaaagtcaacgtaaaaactggtttcttggtttggttgggtcttatttgagttagtttgtttctcagtttctcgtatggattctttggggtactttggtagcctgagtggtctttttcatctctttcgcgtccattactcaaggagacagcataacagatgcagaacaagtcatatttgaagaatgttttgtactaaacttcatttaattattcagtttttaaagggaaaaagggcgtgagctcacacagtgagctgtttatttaaatatcattaaggagaaaaaaaaatatggtgagaagctcgctcctttcaacttgtttggtactgacagctgatagaagctattttctaataataaacatccagtgtgtgaaagacaaaacccactgattgcaatactctttttttaatgataaaacctgtgaagtttcccaaagcaggttttaaaaggaaaaaaaggaaaagcaaaaaggttgctgttctcactcccatctcatttagtgcatgtcttaattcgggattcgtaatgaattggaggatcattagacatttctaggaaccctagacctgttttgcatgtcaattagcattcccattgctctattgaatttctagcttgacaggtagatgtggcaaaaaaaaaaaaaaaaaaaaaaaaagc

SEQ ID NO: 7206 - DNA, 2631 bp, Homo Sapiens
  XM_001127908
ataataataataataataataataataataatctacaatgtcatttcccatccaagcttgacttctacctttactttctgatatggttttgccatgtccccacccaaatctcatcatgaattataatccccataatcctgatgtgtcgagggaggggcctagggggaggtgattggatcatgggggcagttatcctcatgctgttcttgtgatattcagtaagtcctcatgagatcttatagggttttgttttgttttttgggatggagtcttgctctgttgtccaggcaggagtgccatggcatgatcttggctcactgcagtctctgcctcttgagttccattgattctcctgcctcagcctcctgagtagctgggattacaggcatgcaccaccacacccagctaatttttgtatttttagtagagacaggatttcactacattagctaggctggtctcaaactcctgacctcagttgatccacctgccttggcctcccaaagtactagggttacaagtgtgagccaccgtgcccagctgagatctgatggttttatacatgtttgacagttgctccttcacatgttcccactctctgtgcggccaccatgtaagtcggacctgcccttctgccatgattgtaagtttcctgaaggacttccccctctgccatgattgttaagtttcctgaggcctccccagccatgtgaaactgagtcaattaaacctctttcctttaaaaattacccaacctcaggtgtttctttatatcagtgtgaaaacagactgctatactttctgatactcatgcttaagcaattggggaattcagactacctgggatcaaaccatggccccacccttagcagtcatgtgaccttggggaggttacttaccttctccatctcaacaacttctgtaaaatctgtaacatgagattgtttctgagggttaaatgagcatagcacagtggggacactgtcaggcacacactacttgccagatgtcgagtattcatctttattgaaataggactgtggtaagccactttatggctctcgattttgtatgagaaaatcatgcttagtgccttgttagtaaaagaaagaaaacctgaaagtccctgccatggaaggaagaaatagcggggagaaaagggagttggtaagtttcagcatttcagagcttggaggtgccagttaggtttctattttatggagaaggaggtggaggcaggatgggtcctaaggtgtcattcaaaacacacagccataactctttattgagagtagagctagggccccagggattgctgtggtcaagttgcggacaaaaatgaccactcgttggaagacaggagaggagtgtttagttacaaaagcagtcaacaattcaggtgtatctatattcagacagcaaataaaagttgttcaacttggttgctaatgggacccactctactgaggctttgtatagaactcatagaggaagctggcttcaaggaatgaactaccctgtgcttttcttaggactaaaatctcaggaagctggtgatgaatgaaaaccttagtcccactggcactgcacgaggggccaggagagcagcagcatcataagccacagggtggggcagccaaggcaggggcattctgagctgttggggaggggtggcaggcagggtggggcactgtgaggtgtcggggagggcattgtgaagtgtggggtggggcattgtgtgccacatgcctgggctcccacctggggccagtgggcttcagtctgtaggtgactacagaaggagaaggagctccgtctgttctcttttcaggcagttgttgtgtctctcagcgcttgttgggttcacaacctattaaataagccggctggtcttcaccctcccagacaagtcaactcaggggaggcagcagggtgcgggccttggcccgcagccctagccggggccggggccggggccggggccagggctggtgcccggggccgcgctgtgaggtgggcaggcgaggagcgggaagaccatctctgcaagtgcagcatagcctcggcctaggacagcgggagtgcgtggccaaagctgtgagcagaggcacaggtggtggcagacagtagaggcgccccatggggaacatactgacctgtcgtgtgcaccctagcgtcagcctcgagtttgaccagcagcaggggtcggtgtgtccctctgaatctgagatctatgaggcaggagctgaggacaggatggcaggagcgcccatggctgctgctgtacagcctgctgaggtgactgttgaagttggtgaggacctccacatgcaccacgttcgtgaccgggagatgcctgaagctttggagtttaacctttctgccaatccagaggcaagcacaatattccagaggaactctcaaacagatgctttggagtttaacccttctgccaatccagaggcaaacacaatattccagaggaactctcaaacagatgttgtagaaataagaagaagcaactgtacaaaccatgtaagtgttggtggaaataacccagatgaagaaaagaatagcacagccaattctggggtctcctctacagacatcctgagcttcggatctggatga

SEQ ID NO: 7207 - DNA, 1141 bp, Homo Sapiens
  XM_001127981
aaggatggcatctacccagctcaactcgtgaactactaggccccccaggggtccagcagggtggctggtgacaggcctgggcctctgcaactgccctgacaggaccgagaggccttgcccctccacctggtgcccaagcctcccgccccaccgtctggatcaatgtcctcaaggcccctggcccttactgagcctgcagggtcctgggccatgtgggtggtgcttctggatgtgagtctcttatttatctgcagaaggaactttggggtgcagccaggacccgtcagcacactgggaaaccgggccagcgtggggctccctgccttctggactcctgaaggtcgtggatggatggaaggcacacagcccgtgccggctgatgggacgagggtcaggcatcctgtctgtggccttctggggcaccgattctaccaggccctccagctgcgtggtctccgcagaccaggctctgtgtgggctagaggaatgtcgcccattactcctcaggcctggccctcgggcctccgtgatgggagccccccaggaggggtcagatgctggaaggggccgctttctggggagtgaggtgagacatagcggcccgggcgctgccttcactcctggagtgagtttccatttccagctggaatctgcagccacccccatttcctgttttccattcccccgttctggccgcgccccactgcccacctgaaggggtggtttccagccctccggagagtgggcttggccctaggccctccagctcagccagaaaaagcccagaaacccaggtgctggaccagggccctcagggaggggaccctgcggctagagtgggctaggccctggctttgcccgtcagatttgaacgaatgtgtgtcccttgagcccaaggagagcggcaggaggggtgggaccaggctgggaggacagagccagcagctgccatgccctcctgctccccccaccccagccctagccctttagcctttcaccctgtgctctggaaaggctaccaaatactggccaaggtcaggaggagcaaaaatgagccagcaccagcgccttggctttgtgttagcatttcctcctgaagtgttctgttggcaataaaatgcactttgactgtttgttgtca

SEQ ID NO: 7208 - DNA, 732 bp, Homo Sapiens
  XM_001128030
ggctgtctctgtggctggttctgcggcgtgcggccagccatggagcgctctgggcccagcgaagtgacaggctcagacgcatcgggaccggacccgcagcttgcggtcaccatgggcttcacggggttcggtaaaaaagctcgcacatttgacttggaagcaatgtttgaacaaactcgaagaacagctgtggaaagaagttgcaaaacactggggctggtgaattaccagatctccgtcaagtgcagtaaccagttcaagttggaagtgtgtcttttgaaatcagaaaacaaagtcgtggacaaccaggctgggacccagggccagctgaaggtgctgggtgccaacctctggtggccgtacctgatgcacgaacaccccgcctacctgtactcgtgggaggatggtgattgctcacaccaaagccttggacccctcccagcctgtgacctttgtgaccaactccacctacgcagcagacaagggggctctgtatgtggatgtgatccgtgtgaacagctactactcttggtatcgcaactacgggcacctggagttgattcagctgcagctggccgcccagtttgagaactggtgtaagacatcacaatcccattattcagagcgtgtatggagtggaaacgcttgtagggtttcaccaggtaagcggtgttgaactttctgcttgtgtattctctcttggcagagatgccacttgcctctcccaccctg

SEQ ID NO: 7209 - DNA, 4566 bp, Homo Sapiens
  XM_001128149
atgagccgtcgtgtgagaaccagcgagctgtggaagagaaatggccccagttcatcacccttctctagcccagcctcatcccgctcccagacaccggagaggccagcaaagaaaataagagaagaagagatgtgtcatcattccagttcttcaactccattggcagcagacaaggagtcccagggagaaaaggctgcagatacaaccccaaggaagaaacaaaactcgaattctcagtctacacctggcagctctgggcagcgtaagcggaaagttcagctgctgccttctcggcgaggggaacagctgaccttgcctccacctccccagcttggctattcgatcactgccgaggacctagacttagagaagaaggcttcattacagtggttcaaccaggccttggaggacaagagcgatgctgcctcgaactctgtcactgagaccccacctatcactcagccttcatttacctttaccctgcctgctgctgcacctgcctccccacccacctccctcctggccccaagcaccaacccactgttagagagcttgaagaagatgcagactcccccgagcctgccaccctgcccagaatctgctggagcagcaaccactgaggccctctcacctccaaagacacccaacctcctacccccgctgggtttatcacagtcagggccgccagggctgctccccagcccctcctttgactccaaccccccgaccactttgctggggctgatccctgctccatccatggtaccagccactgacaccaaggcacctccaacccttcaggcagagacgactaccaaaccccaagccacatctgccccgtcccccgcccccaagcaaagcttcctgtttggaacacagaacacctcaccttccagccctgccgcccctgctgcatcttcagcatctcccatgttcaagcccattttcacggctccacccaagagtgagaaggaaggccccacaccgcctggcccttcagtctcagccacagcgccctccagctcctccctccccacgaccaccagcaccacagccccgaccttccagcctgtctttagcagcatggggccacctgcatctgtgcccttgcctgctcccttcttcaagcagacaactactcccgccactgctcccaccacaactgccccgctcttcactggcctggccagcgccacctctgctgtggctcccatcacctctgccagtccatccacagactctgcttcgaagcctgcgtttggctttggcataaacagtgtgagcagcagcagtgtgagtaccacgaccagcaccgccactgccgcctcacagcctttcctcttcggggcgccccaggcctctgctgccagcttcaccccggccatgggctccatattccagtttggcaaacctcctgccttgcccacaaccaccacagtcaccaccttcagccagtccctgcccactgccgtgccaacggccaccagcagcagcgctgccgactttagtggttttggcagcaccctcgccacctccgccccggccaccagcagccagcccactctgacgttcagtaacacgagcacccccacgttcaacattccctttggctcaagcgccaagtccccgctcccatcatatccgggagccaacccccagcccgcatttggggccgctgaggggcagccaccgggggccgccaagccagcccttacccccagctttggcagctctttcacttttggaaactctgcagccccggctgctgcacccacacctgcacctccgtccatgatcaagatcgtgcctgcgcacgtgcctacgcccatccagcctacctttggcggtgccacgcactcggcgtttgggttgaaagccacggcttcggccttcggcgctcccgccagctcacagcccgcctttggcggctccactgctgtcttctccttcggtgcagccaccagctctggctttggagccaccacccagaccgccagcagcgggagcagcagctcggtgtttggcagcacaacaccatcacccttcacgtttgggggttcggcagcccccgctggcagtgggagctttgggatcaacgtggccaccccaggctccagcgccaccaccggagctttcagctttggagcaggacagagtgggagcacagccacctccacccccttcgcagggggcttaggtcagaacgccctgggcaccaccggccagagcacaccgtttgccttcaacgtgggcagcacaactgagagcaaacctgtgtttggaggcaccgccacccccacctttggtctgaacacccctgcgcctggagtgggcacatcaggcagcagcctctcctttggggcatcctcagcacccgcccaaggctttgttggtgttgcacctttcggatcggcggccccttcattttccattggtgcgggatccaagaccctaggggctcgacagcgactgcaggcccgaaggcagcacacccgcaaaaagtagcctttgtcccctgtccctgttccccccaccccttccctaaatctggaccttggcacgtgctagaaagagccttggacccttccagctgcgtaaagcaaacctaccccggatctctggcttcagccgccagggggcagtggcagccctggggccctttcccttctggaggaagcacaagcctcagggaaggggaagcaggatgcggagggccaaagcccgggacctctacttgaacagttccactggggaggctggagaactaaggaaacacctgtacatagtgtccgctgccctgactcccgcttagcgcacccttaggcaggcgccccttccacctttccccgagagccgtcgtcgctggagggggcagggtccagcccgcctggatcggtggtgtgcacctgatgggatttgggaaatgggctatccgtaaagctttatcttgcttggcttagctgtgagaagtggttctcttcctctggtcccttctggggactctgtttccccatttcttgctgctgtgtccctcaccggttccttgcaggattccctcctttttaaatgcccttgaatctagctttgccttggagaccccagtgggtgctgctcctgccattttcttcctgccaagcctgaatcaatgtttcatctccaaccctctgccagtttggcccctcagagcttggtggctcaagactgttagcctggcagagccaggggtgaagggagaagctcttggagcaggcaggatgcccaccgctgcttcagctgcctcctcgcccagctaccctttggccccattgggccctcgtctgcctctccaggattgtatgtttcaagccttgccctgtgttcctttgtctgacgctctgtgtattgctctttgaatcgagtttggaggaagagttgagttgtatgagtggcggcatgttggtagtgccggacttcctgtttcaagttttctggggcctcgctaattgaatgtggaaagtagcaccacttgacggctacaagtgccgactcctgaattttcccatggtgttctgacttcaagggctggcagccagggagaatgggcccaggggaagcaaagacctcttccctctgccgtttctgtcccacttaactgacctcactggaggctacatcacccaaagtagatgttagaaaacctaaattaatgaaccatatttttaaaatcctatttttcccaaacagggccctctgcagcccagcctttccttccgtccttctgaaaccacataccccaggcccaagcgccttgctgccacgcccaacctctttgggagaagtatgaatgcgtgtgtctaaattaaaagaaaaaaatatttaaacgttttttaacaaaaatttatttttgtatttaagctaaattgccttttaaattccttcaagcttggttcattgaggtggttaagtataaatgctattaactaggaattagctgtatagttaagttatgcctgtgcaaagaagaggctcaaatgctgtccccggcagctttcctgggggactagagctccttctggccatgttatatgaaatgtaattcttattttataaataatgtgatgtaaatgtaactggtgccccctccccgatgtgactgagggtgagtgagtggtggtggggctgctccttcccacccctcagaacagctctgatcctcgttaatacctggctgcgtgtgcagctgaggagggagtgaacctcaagcctaaatacctgttaggattggagggtctgggtgggcctgggcctagcaatcaagcttctacctgtaccttatgtaaggtagaccctcctagtgtcagcacctgagctagtttacctcagttccgcaggcaggacagccggtccgggaaccctgagtgagtgtgagtgtggatgtgtacagtacacgcactggacggcagcgggaggctgggactttccattacaaatagagacttcattcctgttgagtctagttggaacttttagtatgaatgtgagatttttctcctgcttgtgacattaagaataaaaaactgtgatcta

SEQ ID NO: 7210 - DNA, 977 bp, Homo Sapiens
  XM_001128310
attgaatgcggcaagggtctggaggctgaggaccaggcagacagacattcagagttgctggaacgcgacagagacagggagtcagactggtcatgcaaggccagctctggggtctcagcaggtggtccgcaacatgacctctgagttcttcgctgcccagctccggtcccagatctctgaccacaccactcacccgatctcctactacaagcccgagttctacacgccggatgacgggggcactgctcacctgtctgtcgtcgcagaggacggcagtgctgtgtccgccaccagcaccatcaacctctactttggctccaaggtctgctccccggtcagtgggatcctgttcaataatgaatggacgacttcagctctcccagcattcaccaatgagtttggggcacccccctcacctgccaatttcatccagccagggaagcagccgctcttgtccatgtgcccgacgatcatggtgggccaggacggccaggtccggatggtggtgggagctgctgggggcacgcagatcaccacagacactgcactggccatcatctacaacctctggttcggctatgacgtgaagagggccgtggaggagccccggctgcacaacaagcttctgcccaacgtcacgacagtggagagaaacattgaccaggcagtgactgcagccctggagacccggcaccatcacacccagatcgcatccaccttcatcgctgtggtgcaagccatcgtccgcacggctggtggctgggcagctgcctcggactccaggaaaggcggggaacctgctggctactgattgctccaggcagacaaggctgacaagcaatccagggacaagatactcaccaggatgaggaagaggactttgggggacgggcttcccctgtgagcagcagagcagcataataaatgaggccactgtgccaggctccaggtggcctccctggcctgtctccccactc

SEQ ID NO: 7211 - DNA, 1579 bp, Homo Sapiens
  XM_001128342
atggacccaactattcctgttttaccccaaaccgggaaccagctgggaggtcctccgagctggacggggaggcgggcggcctctcccactccccacccgctccctccctgccgccgccgcctccggctgctcttgcgacaagccaagaagctggggcgcctgctgggagcccagcgccgtcctcccgtttcctgtgatctaccagtcctcctctccgcggaggcttggccgggcgcacctgaggccggcagcatccccgtggcttggcggcagctgcaacctccacagacggccgccaggtggcgccacgccggggcccgagagcaggcgggcccggggcggggttggagggactcagctacgcgcccggggaggccgcgggccctcgcagactaccgaacttccattctgccgccgggttttcacacctgccggccccgaggaaacaatgacgttgggattttggggggccgccccttgactcgggcgaatgggacacgaacggcgaccccttgctctcttccatccgcctgccgccgttgctgcccaccgactcctacagctcatttctcgctcctgcaggctccaggaatgcaaataatttctcactgggttttggcgggggcgcggagctgcggagaagcgcgcgcccgacagctttcgccgcagctgggtccccgggcgctggcggctgcggcccccagatacgggcggaggctgcaatatgcacatgcggccacagtgtggctccaggggcccgccgcgggacacgctcggagcgcgacgccccatcccatcatttacggatcaaaccaaataatctagaatcaagttgctgtgtgtgtcatactcctcctgttttttttccctaaacttttagtagagtcatttacatagttcagtttttacctcagctatgttacacagtggcaggaaaatattttgtctccaaactacagcccaagtatgagagcagcgtatcctgaagctaattagtaaccagaaaatcaggaaggtaaagcaaatctctggaggcaagatctggactctatgatatcgccgcttctccccacttgaagcgtctctttgcagtgccgcacttggagatttggacttaatcgttaaacaaaaagaacagttacattctgccttcctacagggcaggggcctaggactggcaacatttttgttgtctctagaaatagaggggttatgagagagcctcaaaagagagggcaagaataacacatccatttctcatcatgagttacccccttgtatgcctagaacgcgtatggagacattctcttttagtaaagtcaaagagaaaagccatgaactaagtatcctgaacacagaggcgtgagccctctcagtctcacagtcccttaggagtcatttgtaagtactatttccttccttattgtctatactattccctcttgtctccctgaaatctacccactcctggctgtgtgtgtgtctctttctgtctgtttctctgtcttaatcttctgtacatatgcacccactcacctttttaccttgttctgagaaataaaatactatttttcaaact

SEQ ID NO: 7212 - DNA, 2089 bp, Homo Sapiens
  XM_001128419
atgaactgcaaaatcccacccgatcctttgcagaccctgaaagacactactcttttccctcctcgcgccccggaaaagagccgcagacgccagcgaaaggctgcgcaacgcttgcaacgccttggcgcccgcacgcggttctgggctaccctgcgcgctgtctgcaggccgcgacaactacggcctccctcggggaatgcgggggaaggccgcgggccgccgtggcgacggctgcaggcgcgcggctcagttcccgcggcccgccggtttctttgctcatccgtggtgcagccgagcccaccgagtctggtcggaccaggggttgctgagagccgccaggaagtccccaccccgcaccgcccccggggccaacgcgctcggctgctcctccgcatagttttgcgcccggcagcctatctgccccgaggctccgatggcccctcctggcctgcccagggctatggcagctgcaggccggctctacccattgctcttcccgtccagaccccgctggccttgagccctgcttgctcgcagatttgtcccacccgggacagggaaaggaaaagaagccgcgttcattttcttagcattcaggtactccctgtaagcaccgagcaaaaagcttcgctcagccaccttgcgccgtcccggcagctcaaaggacaccgccagaggacccgtgagcgtggggtggtgtccgtcccaggagcctctgggtgcgcgctgcgctacctcgtgcccttggctttgccgtttgccatcctcccgggccaaggctgcggcgtcgagcgcctgcacaacccccttccctacagctcctctcctcccctccccccttccgcccccgggccccggagccgagcggggccaccggggggcggggagcgccacagcgcgtggccacgccccccgagccggctttttctagggcggctccgggagcctctccgccggctgcgccgctcgcctccaagggagcgttccgtgctggcccctcgctcggctccgctccgcctccgccacgccgctctccgagcttcggcagcagccagcgccccctccacgctgcgaccccggctctcggctctccgtccctgtagctccgtgcccagcacctcgcgccccgcaacctcgccgtctcccaagtcccgggccccgcttctgtcgctgtccgtcgctgtccgtgtgtcgctcgctcggtctgtctctccgcctccccagcccttccttcctccctgtctccctcgctggcttgcacgttcgctcgctctcggacgcggcgaaacagcttcgcaggcaaatcccagaaacctttgcaaaaagcttgcaatgaaatttaagaagttcttcgatttcggcgccattttcgagtggagccagagtgttctaaatggttcaaaacgtgaggcgctgctataccccctcgtggggaaggtagaaggtggggtctgccggacgcgtgttcctgccaccaggtgcccgctccccgcgaggccggctcaggagcaggtagaatgtaaacaattgaaaaaaatcccttcccaatcagaataccacccacaggacaacgaagaaaacctatcttcagtccccacccacgaaatgctggggggtggggaggactggaaaaggagtaaggggagaggaagggtgagcagctgcaagaagtctttacacctctctgcggttcctggtaaacgcgctcatgtcctggaaggaagcccggtgccagccagccttcctgaaagaccaagcccgcgccatccggcttcctccagtggacgcctgcaggacccaggtgagacacggaaccggttggggacgcgagccagggatcctgaccggttgggggcggcgagcaagggatcctgacttgggggcgttgcctcccggaatccaagcggccttttgcccgggtctcccgagatgcatcgaaattgagctcgtccacacagccccctgactgcgtgatgcccttttctgacttaaaacattccttgtacctttatttacacgatccaagttgcagtgtgcctagattttcctccaaggacaaaaatgtgaataaagcaatattttagccaaa

SEQ ID NO: 7213 - DNA, 2334 bp, Homo Sapiens
  XM_001128421
aagcagtagtaagatttattgcaaagaacaaaagaacaaagcttccacaatgcggaaaggaacccgagcgggttgccactgctgcctggggcagcctgcttttattctcttatctggccccacccacatcctgctgattggtagagccaagtggtctgttttgacagggcgctgattggtgcgtttacaatccctgatctagacacaaaggttctccacgtccccaccagattagctagatacagagtgtggacacaaaggttctccaaggccccaccagagtagctagatacagaatgtcgattggtgcattcacaaaccctgagctagacacagggtgctgattggtgtgttcacaaaccttgagctagatacagagtgccgattggtgtatttacaatccctgagctagacacaaaggttctccacgtccccagcagactcaggagcccagctggcttcacccagtggatcccgcaccggggctgcagatggagctgcctgccagtcccgtgccctgtgcctgcactcctcaacccttgggtcgttgatgggactggacaccatggagcagggggtggggctcgtggaggaggcttgggccgcacaggagcccacggagggggtgggaggctcaggcatggcgggctgcaggtcccgagccctgccccacgggaaggcagctaaggcccggcgagaaatcgagcgcagcgccggtgggctggcactgctgggggacccagcacaccctcagcagccgctggcccgggtgctaagcccctcattgcccggagccggcagggcccgccagctgctccgagtgcggggcccaccaagcccacgcccacccggaactccagctggcccgcaagcgccccgcgcagccccggttcccgctcgcgcctctccctccacacctccctgcaagctgagggagcgggctccggccttggccagcccagaaaggggctcccacagtgcagcggtgggctgaagggctcctcaagtgccgccaaagtgggagcccaggcagaggaggcgccgagagcgagcgagggctgtgaggactgccagcacgctgtcacctctcaccagcactttgggaggctgaggcgggtggatcacgaggtcaggagatcgagaccatcctggctaacacggcgaaaccctgtctctactaaaaatacaaaaaaattagacgagtgtggtggcaagtgcctgtagtcccagctactcaggaggctgaggcaagagaatggcgtgaacgtaggcagcagagcttgtagtgagccgagatcgtgccactgcactccagactgtgcgacagagcgagagactccgtctcaaaaaaaaaaaaaaaaaaaatctataaactggtgcaccggtaccggtccccatctccccaggttatgaggaacaaatgagataatccacagagcaggcgaaacacattgagtaagccactgttatttactaagaagacaggctcacggaatggttgcggcagcctcattagttcctttgcgaagtgcagacacccgctctctgtttcattgattcctaaatgcattttgttcacatcttaacacctctgaaatcaggatgagtcctaaaatcgatagcttcttaacattttagtttgcagcaatctttcccttcatagtgacaccagataatcgtgcatcgcttagactgaatgaatgcaattgattcattatacaatgaaatgtagatatatgacatatacacacatataccatgtgtaccatcgtaactaagagaccactctagataagctatagaaagtataaaaatcattttactttaatacaaaatcacataaagaaaggcatgttggctaaatcaaatattcactaaatatcagtgaagtcaccactggaatctcaatagcacattttcctgctttcttttctcccttctgctaaccattgaagaccagggtcatccgtgggagcagatgagtaggacacgcgtctgcacgctggaggccctgggggttgacatgggagcaggaagtggacccccccaccctgcacatcccttctgtttttcttgatttcagtctcactggcccaggccaaatcttcaagggtgtctagttctgcagccagggagaaagtgatgccaagagaacctcgtctcctccctcctcagtctgctttgaaggggaaataaatacacaggcctagtgtgtctgtgtggcacagggaggtggttttgccaggcatcttggaaggttgtcttctagaatcagagccatagccttacttgtggccttggatctaggtctgtttccccgatcgaaaaaagaac

SEQ ID NO: 7214 - DNA, 1169 bp, Homo Sapiens
  XM_001128423
atgagcctgcggctggtccttcctggcgactgcgggatcctgagcgacccagtccgccttgtagcgccaacctcagtttccctctgcagcctgctgcggaggcgaagccaggcagcgcagcctctgcaaggggaggcgcgcgaggcggcgcgggagcgcgcggagcgggtgcgcagaagactggaggaggcggagcgccacaaggaggacttggagcagcacagcaggcagctgcaggagcagtgggaggagctgtcgagtcagctcttctacggaggggaaccgcagagccagaagagcacggagcagcaactcgcagcccaattggtgacgctgcagaatgaactggagctggcggagaccaaatgcgccttgcaggaggagaagctgcagcaggacgcgctgcagacagcggaggcctgggccatattccaggagcagaccgtagtcctgcaggtgcggccccactcagacgccaaggtgcctcccgcctctcctcccccagacctggggcggtgtgacgggcagcttcgcggagtgcagtacagcaccgagtcgctcatggaggagatggccagggcggaccgagagacgcggctgttcggcggccctcgcgcgctggccatcaggcggtgcgtgctgggcgcgctgcaggtgctgctgacgctgccgctcctcttcctggggctgtcgctgctctggacggtgctgttggaccccggcgccgtctccgcgtggctctggagcctcacctcggagacgacgctgcgccgcctgcgctacacgctgtccccgctgctggagctgcgcgctaacgggctgctgccaacctaagtgcagcgccccgcgcctggctccaggtggactccagggcacctggctttatttctggtgcactcctctcctgagagtgtagaccaaggttgcctaataaactcaagggatgaagctcgtgggttcgtcgtctgtctcccatgtcatgtaggagcttgactggcttttcagcctccaaagattccttccttccttacagctcatggatttagagccactccccagtattgtaaacagcatttttagtttttcaggatacataatttgccatattgccagaaacttgtacatagcatttgacactttgccaatctgacaagctgccttttcaagta

SEQ ID NO: 7215 - DNA, 2916 bp, Homo Sapiens
  XM_001128450
tagctgggcgtggtggcgagtgcctgtaatgccagctactctggaggctggggcagagaattgcttgaacccagtaggcggaggttgcagtgagccaagattgtgccactgcactccagcctgggcaacagaatgagactctgtctcagaaaaaaaaaaaattattaatagatggtgaccctcatcttcatgttttctgcatctattgaagtgcgccattgagatcgtggagttcttccctgtttgtccatatggtgaacaacactgattttctgatgttgaacaatctctggaataaactctgtttggtttccatggatttctgtttccctttagattttgttagtaatgtattttggatttttgcatccaagttcataattgtaactggacaaataaaggcagattttaaaaggacaagttgggaggctaaggcggaaggatcacttgagcctgggagattgaagctgcagctagcctcgattgctccactgtactccagcctggtgacagcaggacctgcctctaaaataataatacttaaaaggacgagtttacctacagtctcaccaagcaatgaaagagcttatcttcctcctgtttcctttacggatcttgctcatgtattttatcttagttactttagcataaatgctaaatcaaattctttttcactagacatcatcatagctctaggcataccacataatacccaagcacattttaatcattaaaattgtttcctttttttgtggctactgtaaccacttcagcgaaccatttagtgtgtagtgggtttaaattattttttctcctttctgggataaatttcccaggagaaggataattgggtcaaaagctacgaacatatttatgggttcttttccacaagagatcgatcagtttgcaagtgccatctgcagtgtgggggaaccaatcttcaacttgcctgcatttggtattagtattttattaacctttcattgatccaattacggctctttgacacaattttcatcagtgatggactaagtgtgatccggcctgacccgcctccggccggcgtgagaaggggcatgtgtcgggctacgctcgggcttcccctgccgcccattgtgatccagcccgctaggcgctccctgccgcccattgtgacgcctgccagccgcaggctgggtccccgaggcgggcggcatttaggctcggtctccacagccatggccgcgacgcaggagctgctgctgcagttgcagaaggataaccgagatggtcgccagcggaagcaggagctagagaagctgatgcgcgggctcgaggccgagagcgagagcctcaaccagcgcctgcaggacctgagcgagcgggagcggagcctgctgcggaggcgaagccaggcagcgcagcctctgcaaggggaggcgcgcgaggcggcgcgggagcgcgcggagcgggtgcgcagaagactggaggaggcggagcgccacaaggaggacttggagcagcacagcaggcagctgcaggagcagtgggaggagctgtcgagtcagctcttctacggaggggaaccgcagagccagaagagcacggagcagcaactcgcagcccaattggtgacgctgcagaatgaactggagctggcggagaccaaatgcgccttgcaggaggagaagctgcagcaggacgcgctgcagacagcggaggcctgggccatattccaggagcagaccgtagtcctgcaggtgcggccccactcagacgccaaggtgcctcccgcctctcctcccccagacctggggcggtgtgacgggcagcttcgcggagtgcagtacagcaccgagtcgctcatggaggagatggccagggcggaccgagagacgcggctgttcggcggccctcgcgcgctggccatcaggcggtgcgtgctgggcgcgctgcaggtgctgctgacgctgccgctcctcttcctggggctgtcgctgctctggacggtgctgttggaccccggcgccgtctccgcgtggctctggagcctcacctcggagacgacgctgcgccgcctgcgctacacgctgtccccgctgctggagctgcgcgctaacgggctgctgccaacctaagtgcagcgccccgcgcctggctccaggtggactccagggcacctggctttatttctggtgcactcctctcctgagagtgtagaccaaggttgcctaataaactcaagggatgaagctcgtgggttcgtcgtctgtctcccatgtcatgtaggagcttgactggcttttcagcctccaaagattccttccttccttacagctcatggatttagagccactccccagtattgtaaacagcatttttagtttttcaggatacataatttgccatattgccagaaacttgtacatagcatttgacactttgccaatctgacaagctgccttttcaagtattgtgatttgaaattatttctactatatttgaatttatttctaccatttgtaacatgttgatcctgatttttcaatgctcccctttccttctgtttatttgggaagtcacactctgtattctggtattcttactacttgagctcagctcatcgctgtcatcttcccctaaaccgccttaaagcatcttaggtcttttccctctgatcacatgtgctacttttttttttcttttctttggagacggagtcttgctctgcgcccaggatggagtgcagtggcatgatctcggctcactgcaagctctgcctcccgggttccagcgattctcctgcctcagcctcccaagtagctgggacttcagacgcccgccatcatgcccgtttaattttttgtattttttgtagagacagagtttcactgtgttagccaggatggtctcgatctcctgacctcgtgatccgcc

SEQ ID NO: 7216 - DNA, 1190 bp, Homo Sapiens
  XM_001128702
atgggagaggagacagcgtcttggcaattgagacctgcttatgtacagaagtacgtcgtgaagaattatttctactattacctattccaattttcagctgctttgggccaagaagtgttctacatcacgtttcttccattcactcactggaatattgacccttatttatccagaagattgatcatcatatgggttttggtgatgtatattggccaagtggccaaggatgtcttgaagtggccccgtccctcctcccctccagttgtaaaactggaaaagagactgatcgctgaatatggaatgccatccacccacgccatggcggccactgccattgccttcaccctccttatctctactatggacagataccagtatccatttgtgttgggactggtgatggccgtggtgttttccaccttggtgtgtctcagcaggctctacactgggatgcatacggtcctggatgtgctgggtggcgtcctgatcaccgcactcctcatcgtcctcacctaccctgcctggaccttcatcgactgcctggactcggccagccccctcttccccgtgtgtgtcatagttgtgccattcttcctgtgttacaattaccctgtttctgattactacagcccaacccgggcggacaccaccaccattctggctgccggggctggagtgaccataggattctggatcaaccatttcttccagcttgtatccaagcccgctgaatctctccctgttattcagaacatcccaccactcaccacctacatgttagttttgggtctgaccaaatttgcagtgggaattgtgttgatcctcttggttcgtcagcttgtacaaaatctctcactgcaagtattatactcatggttcaaggtggtcaccaggaacaaggaggccaggcggagactggagattgaagtgccttacaagtttgttacctacacatctgttggcatctgcgctacaacctttgtgccgatgcttcacaggtttctgggattaccctgagtctcaaacagttggaaactagcccactggacatgaaagccaagacataggaaagttattggtaggcaaatcttgacaacttatttttctttaacaacaacaaaaagtcatacggctgtcttgctactaccagataaatgatgctgctgtgtgaaaggaagaactgtctcata

SEQ ID NO: 7217 - DNA, 1109 bp, Homo Sapiens
  XM_001128785
acagtcagcaggatggacctggagatgtcagggctgaagaccctggagcatgtggcagtgacagtctccatcactcacccacggcgcggcagcttggagctgaagctgttctgccccagtggcatgatgtccctcatcggcgccccccgcagcatggactcggatcccaacggcttcaatgactggaccttctccactgtgcgatgctggggggagagagcccgagggacctacaggcttgtcatcagggatgtcggggatgagtcattccaggtcggcatcctccggcaatggcagctgaccctatatggctctgtgtggagtgcagtagacatcagggacagacaaaggctgttagagagtgccatgagtggaaaatacctgcacgatgacttcgccctgccctgcccaccggggctgaaaattcctgaggaagatggttacaccatcacccccaacaccctcaagaccctggtgctggtaggctgtttcaccgtcttctggactgtttactacatgctggaagtatatttgagccagaggaatgtggcttccaatcaagtttgtaggagtggaccctgccactggccccatcggagccggaaagccaaggaggaagggacagagctagaatcagtgccactttgcagcagcaaggatccagacgaagtggaaacagagagcaggggccctcccaccacctctgacctccttgccccagacctgctggagcaaggggactggagcctgtcccagaacaagagcgccctggactgccctcatcagcacctagacgtaccgcacgggaaggaggagcagatctgctgacctcagggcctgacagtgtgggacaggctcttctttcccaaaattagggagctcttgacagaaagcagttctgatgcttacatctggaatctgaggcatcctctgactccactcaaagagggtgagggccttcttaagatacaaatggcggaggattgctgccagagaagtctggtcagagccacagggtctgcctccagccaaacgggagcttttggtgagaaggtgttggacaggggattggcgccccctttgggttggcctccatcctcttttttttt

SEQ ID NO: 7218 - DNA, 5389 bp, Homo Sapiens
  XM_001128983
aggctctgaaacaggctgagttcacaccgttgcactgagctgctggaggatggacaatcctgtgctacctgggtctgagtacagtggaggcagcagcagcacctgcaggagtgggtaacgatacaagctgcggaaggaactcgcagtcgactggcacaatcacgccttcagcaccctagtaattagggagctgccccagacttcggtccaagtccaaactctagtacatgggctacggatggagaagagtgtggggctgaccaaggttcatgcctgcacttcactgccagaagacagatcaatccatgtcaagcacaggtctgcctttatgtccaggaacagcacccacttcatcactaaaggacagtgatcctcagaataactatcttttacacgggcatcacatgcagcgaaaaagttaacaaagctcgtcacacgcttgccctcactggccttggcaccaaaagggaagggaatggggggagctagccaggtttgtgacccattttacttctgggaaacagactcagagagctctagggacttgtccaaggtaatacaggtaacagccagaatctaaaccaatgtctagtttttctacagagtgtgtttttactactgataattcagtgcctccaaagtcaggcagagtctctgctatgggaaaggcaagatgtaaaccacgatgactttctagcttttcctcagttcagcctggttcagcagcgtgttggcctctgtgtgggtgcacaataggaagaatcaacatagctctgcctcagcctacttggggttgtggggagggtcttaggtaaaccaattcctccctaagcctcagcttcctcatctgtaaaatgggggttggctcctctctggcattctgcgagtgtgccaagccacgtggtattcctcttgttcccggggagcctgtttgatgtggggtaccctggaggctgcagggctgacggctctcctggctcattaaggttccctacggagaaatactggttttgtgtttgaggttcgaatttgtagagcaataggggcactaataacgttgggcaagcagaccggtgggccctttgaagtctgaagaatcaacgcgcaaaagggaggaggtgagcaggtggtcgttcaaacgtcaggcgagggcaccagctggatctggaggaactgagacagtgaaaggaaagcaggcaaggttctagtctgggatatgcacgaatcgcggtctcccttccctctctatgcctccgcagtccttcccgttcccaaaggaggaacagcccgagggctcctggagcaacggaaggaggactggatgcggggaagggcaaagggcgcggaacggggtggggagtctgcgggcgagctcggaggacactggcgcacctcccccgccggctcacggccgcatccgccacatccgaaggcgccgcgacttcccggagaccccgaagcgtgcgctctcatccgggtcctgcgggcgctggcggaaagaggcgaggcggtgcctccgggggcggggcctccttcggttggcggcctcgggcttcgggagtcctccaagaggccaggtgaggccgtcccgtgatgccccgcgccccggccgctctggcctgcaacgtgtctctggggcggaggcagcggcagtggagttcgctgcgcgctgttgggggccacctgtcttttcgcttgtgtccctctttctagtgtcgcgctcgagtcccgacgggccgctccaagcctcgacatgtcgtacaactacgtggtaacggcccagaagcccaccgccgtgaacggctgcgtgaccggacactttacttcggccgaagacttaaacctgttgattgccaaaaacacgagattagagatctatgtggtcaccgccgaggggcttcggcccgtcaaagaggtgggcatgtatgggaagattgcggtcatggagcttttcaggcccaagggggagagcaaggacctgctgtttatcttgacagcgaagtacaatgcctgcatcctggagtataaacagagtggcgagagcattgacatcattacgcgagcccatggcaatgtccaggaccgcattggccgcccctcagagaccggcattattggcatcattgaccctgagtgccggatgattggcctgcgtctctatgatggccttttcaaggttattccactagatcgcgataataaagaactcaaggccttcaacatccgcctggaggagctgcatgtcattgatgtcaagttcctatatggttgccaagcacctactatttgctttgtctaccaggaccctcaggggcggcacgtaaaaacctatgaggtgtctctccgagaaaaggaattcaataagggcccttggaaacaggaaaatgtcgaagctgaagcttccatggtgatcgcagtcccagagccctttgggggggccatcatcattggacaggagtcaatcacctatcacaatggtgacaaatacctggctattgcccctcctatcatcaagcaaagcacgattgtgtgccacaatcgagtggaccctaatggctcaagatacctgctgggagacatggaaggccggctcttcatgctgcttttggagaaggaggaacagatggatggcaccgtcactctcaaggatctccgtgtagaactccttggagagacctctattgctgagtgcttgacataccttgataatggtgttgtgtttgtcgggtctcgcctgggtgactcccagcttgtgaagctcaacgttgacagtaatgaacaaggctcctatgtagtggccatggaaacctttaccaacttaggacccattgtcgatatgtgcgtggtggacctggagaggcaggggcaggggcagctggtcacttgctctggggctttcaaggaaggttctttgcggatcatccggaatggaattggaatccacgagcatgccagcattgacttaccaggcatcaaaggattatggccactgcggtctgaccctaatcgtgagactgatgacactttggtgctctcttttgtgggccagacaagagttctcatgttaaatggagaggaggtagaagaaaccgaactgatgggtttcgtggatgatcagcagactttcttctgtggcaacgtggctcatcagcagcttatccagatcacttcagcatcggtgaggttggtctctcaagaacccaaagctctggtcagtgaatggaaggagcctcaggccaagaacatcagtgtggcctcctgcaatagcagccaggtggtggtggctgtaggcagggccctctactatctgcagatccatcctcaggagctccggcagatcagccacacagagatggaacatgaagtggcttgcttggacatcaccccattaggagacagcaatggactgtcccctctttgtgccattggcctctggacggacatctcggctcgtatcttgaagttgccctcttttgaactactgcacaaggagatgctgggtggagagatcattcctcgctccatcctgatgaccacctttgagagtagccattacctcctttgtgccttgggagatggagcgcttttctactttgggctcaacattgagacaggtctgttgagcgaccgtaagaaggtgactttgggcacccagcccaccgtattgaggacttttcgttctctttctaccaccaacgtctttgcttgttctgaccgccccactgtcatctatagcagcaaccacaaattggtcttctcaaatgtcaacctcaaggaagtgaactacatgtgtcccctcaattcagatggctatcctgacagcctggcgctggccaacaatagcaccctcaccattggcaccatcgatgagatccagaagctgcacattcgcacagttcccctctatgagtctccaaggaagatctgctaccaggaagtgtcccagtgtttcggggtcctctccagccgcattgaagtccaagacacgagtgggggcacgacagccttgaggcccagcgctagcacccaggctctgtccagcagtgtaagctccagcaagctgttctccagcagcactgctcctcatgagacctcctttggagaagaggtggaggtgcacaacctacttatcattgaccaacacacctttgaagtgcttcatgcccaccagtttctgcagaatgaatatgccctcagtctggtttcctgcaagctgggcaaagaccccaacacttacttcattgtgggcacagcaatggtgtatcctgaagaggcagagcccaagcagggtcgcattgtggtctttcagtattcggatggaaaactacagactgtggctgaaaaggaagtgaaaggggccgtgtactctatggtggaatttaacgggaagctgttagccagcatcaatagcacggtgcggctctatgagtggacaacagagaaggagctgcgcactgagtgcaaccactacaacaacatcatggccctctacctgaagaccaagggcgacttcatcctggtgggcgaccttatgcgctcagtgctgctgcttgcctacaagcccatggaaggaaactttgaagagattgctcgagactttaatcccaactggatgagtgctgtggaaatcttggatgatgacaattttctgggggctgaaaatgcctttaacttgtttgtgtgtcaaaaggatagcgctgccaccactgacgaggagcggcagcacctccaggaggttggtcttttccacctgggcgagtttgtcaatgtcttttgccacggctctctggtaatgcagaatctgggtgagacttccacccccacacaaggctcggtgctcttcggcacggtcaacggcatgatagggctggtgacctcactgtcagagagctggtacaacctcctgctggacatgcagaatcgactcaataaagtcatcaaaagtgtggggaagatcgagcactccttctggagatcctttcacaccgagcggaagacagaaccagccacaggtttcatcgacggtgacttgattgagagtttcctggatattagccgccccaagatgcaggaggtggtggcaaacctacagtatgacgatggcagcggtatgaagcgagaggccactgcagacgacctcatcaaggttgtggaggagctaactcggatccattagccaagggcagggggcccctttgctgaccctccccaaaggctttgccctgctgccctccccctcctctccaccatcgtcttcttggccatgggaggcctttccctaagccagctgcccccagagccacagttcccctatgtggaagtggggcgggcttcatagagacttgggaatgagctgaaggtgaaacattttctccctggagttttacca

SEQ ID NO: 7219 - DNA, 860 bp, Homo Sapiens
  XM_001129013
atggtggccccagggccggtggaggtgatcctggacttgatggcccctccccgtggtcctgggctgcagccctccgccgacctcttggtgaacctgagccgctgccgacgcctcatcgtggtgctttcggacgccttcctgagccgggcctggtgcagccacagcttccgggagggcctgtgccggctgctggagctcacccgcagacccatcttcatcaccttcgagggccagaggcgcgaccccgcgcacccggcgctccgcctgctgcgccagcaccgccacctggtgaccttgctgctctggaggcccggctccgtgactccttcctccgatttttggaaagaagtgcagctggcgctgccgcggaaggtgcagtacaggcctgtggaaggagacccccagacgcagctgcaggacgacaaggaccccatgctgattcttcgaggccgagtccctgagggccgggccctggactcagaggtggacccggaccctgagggcgacctgggtgtccgggggcctgtttttggagagccatcagctccaccgcacaccagtggggtctcgctgggagagagccggagcagcgaagtggacgtctcggatctcggctcgcgaaactacagtgcccgcacagacttctactgcctggtgtccaaggatgatatgtagctcccaccccagagtgcaggatcatagggacagcgggggccagggcagcggcgtcgctcctctgctcaacaggaccacaacccctgccagcagccctgggaccctgccagcagccctgggaaaaggctgtggcctcagggcgcctcccagtgccagaaaataaagtccttttggattctgctggg

SEQ ID NO: 7220 - DNA, 1021 bp, Homo Sapiens
  XM_001129080
gtcttccacttctcacaagccgagaaggtgtacatcatgtaggccccacgtcgtgaagcgcacgcctcggggacgggctgcagtgggcggggaggccacgccttcctcctgtcccacgctccagcctgccgcggcgtttctgtttcttgcgaccaaagatccgtgagcaacgataaatactcttaggaagagagaaaataaggtttcataagtttgtacttgaaaacatttggattggtaggattttgtaacacgtcaaccatttgatgcttctgaaaagtactttcaacttgcgaaggaaactcttctttaaagactgacctaaacaccgagggaaacttaagaacgtttaaaatataggagtccgtgatttccctgtgttttcagtttctttccttctgtgaacgatgagacttggagaacgggctggtccttcaccacttcctgttggccctggcctggccggggaaggtggcagcggcaccggactgacctgcagtgacccgcgatgccgcgccacgagggacacttatggcttcattcgagagctgctgccaaaacgcctggcgccgccaccgtcgggggctggcttcgaggacgcccgcctgcctcgcgggtcgtgtccgcgggactgtgttcgtacgtgcatagtttcgatatcacatcgcggggctgtgttcgtagctgcgtcgtttcgatatcacaccctctgtgtgccgccttacttcctgcttcgagaatgtataacgtggaaatccacgggaccaaatttctgcagaggccttgccggatggttccataactgtagagtctaattgctatccattacagaaattaatcgttcagttgaaagaagtactgatgacttttcaaaacaaatgaaccaccgtagctgacagagaaccgtatcgtagaggtttgtagttagtgcttatttttgcatgttgatgttgactagctaataaactgtaaatgtaaaccatgcgaataaaatggttttctatttctcatttccgtgtga

SEQ ID NO: 7221 - DNA, 1134 bp, Homo Sapiens
  XM_001129241
cgcgctcggtcccccgccgtgcgcccccggtcccgcgcccaggctcccgcccctggcctccttaccagccacttgtcgcccagctgcgaactggagcgggaggcggcggccggagggcccaggacagccccgggagggcggcgaggcggagcaggagcgccccggctccggccacattctcagagtcaggaaaaggggcgagaggccacatgtctccctctcgcccaactgaaaacgaaacggcgctccagcagattgggtggaaagagctgggtctcttttctctgtttttcacgctagaaagggcttgtaaacattgttccttttaaaatgacctaccccaggcatttgtttgggcacacttctgtcctggggtcatcgttcctaggtggcttcggacctgggacttttcctgtatctgcacattgtcgttttatacacaattgccaaggtgggactgctttcaactttactgtgcttgaagctgcaaaggtaatgttgccgccgttctgccctgatgtttcctggaataatgctgaggactgcctttcgggtagccgccctattcagttcacttcatctcggaaatacctgacccctgccttggatccagcggccctcctgagagctgaggaaggaggaaatcctatgtgtctgctcccggagctgccacaacccatcttcccacaactcggaacttggaaaaaggaacccaggacacgactttgcttttcttttggacctagttggtgattatactctgtctcccatggagaccacgtcttgcatccttccttctatatgggatttaggatagaaattaaaaagaaaacatattattttgagtcttgatttggagaaaggtagtattcaggaggaagtaggctatgatacacatagaaaatttgaggacagtgttacttaacaaggacatttctgtctctgcagaagtcacagcttggaggaaaccagtttgcactatttgatgaggaatttggccaccaaaccactgatactttcccaaaggtttggcagaaattgttttttgagtggctcaccagagtacccagaagaatcagtatggaattagaggacagtggcctaccctaaataaagacatgagtgatgtataaa

SEQ ID NO: 7222 - DNA, 8428 bp, Homo Sapiens
  XM_001129292
atggtgatgatgatgatgatgaaggtgctgctgctgctgatgaagcaaaggggagccggtctccctgcgcccgcgggcgtcgaacccaggcccagctctcaccacccaaaggcccgggtgcggctgcagggtgacgaaagcgtcagaccccggggctgctctcagctttgggctttcacccggcactctcccagacaaaggggcttctcagccaggtcgctgttttggtttgtcgtcctcccagcccccaccttcgtccccaacttcccctggcgctggctcggcggcgtccctcacatcgtccctccggccgccaccccgggcccctttgttgtctgccgtctctcccagagaggggtggggggccgcgacattccagggaggagaaaccgaggagtgaggggcaaagacgctcttccatgctctcacccgaggagcgcgccccacgacgctggccagccgttctccggcgacgcccgccatccccgggccgagcgggaggtgggccgggcgttgttgccggcgacagcccccggggagggtggtcgtatgggcgtgcgggtgtgcatgcggtccctgcccttcgcggcagcggcgctcggatccggtggtcgggtcccggagcagcccccggtgcgcatggaccgggttgtggaaagggtgcggaaggctgcgctttggggagcctggcgtggtgctgcctgccccgcgcgcgcctctgagcgacccccggagaggctgatgcatgggtctggggatgggctgcttggcttctcatttgtcagagcaagcttgacagtgtttggagaggaagcaggcccatcctttctattggcagttctctgtgctgttgtctggggaggaagaggagaggatgttgtgtctgatgtacaggcttgtcctgcagaacagggcttcttgctggctgaacccagtgtatttggtgtcaactttgtagtgtgccaactctttgccttgctagcagccatttggtttcgaacttatctacattcaagcaaaactagctcttttataagacatgtagttgctacccttttgggcctttatcttgcacttttttgctttggatggtatgccttacactttcttgtacaaagtggaatttcctactgtatcatgatcatcataggagtggagaacatgcacaattactgctttgtgtttgctctgggatacctcacagtgtgccaagttactcgagtctatatctttgactatggacaatattctgctgatttttcaggcccaatgatgatcattactcagaagatcactagtttggcttgcgaaattcatgatgggatgtttcggaaggatgaagaactgacttcctcacagagggatttagctgtaaggcgcatgccaagcttactggagtatttgagttacaactgtaacttcatggggatcctggcaggcccactttgctcttacaaagactacattactttcattgaaggcagatcataccatatcacacaatctggtgaaaatggaaaagaagagacacagtatgaaagaacagagccatctccaaatactgcggttgttcagaagctcttagtttgtgggctgtccttgttatttcacttgaccatctgtacaacattacctgtggagtacaacattgatgagcattttcaagctacagcttcgtggccaacaaagattatctatctgtatatctctcttttggctgccagacccaaatactattttgcatggacgctagctgatgccattaataatgctgcaggctttggtttcagagggtatgacgaaaatggagcagctcgctgggacttaatttccaatttgagaattcaacaaatagagatgtcaacaagtttcaagatgtttcttgataattggaatattcagacagctctttggctcaaaagggtgtgttatgaacgaacctccttcagtccaactatccagacgttcattctctctgccatttggcacggggtatacccaggatattatctaacgtttctaacaggggtgttaatgacattagcagcaagagctatgagaaataactttagacattatttcattgaaccttcccaactgaaattattttatgatgttataacatggatagtaactcaagtagcaataagttacacagttgtgccatttgtgcttctttctataaaaccatcactcacgttttacagctcctggtattattgcctgcacattcttggtatcttagtattattgttgttgccagtgaaaaaaactcaaagaagaaagaatacacatgaaaacattcagctctcacaatccaaaaagtttgatgaaggagaaaattctttgggacagaacagtttttctacaacaaacaatgtttgcaatcagaatcaagaaatagcctcgagacattcatcactaaagcagtgatcgggaaggctctgagggctgttttttttttttgatgttaacagaaaccaatcttagcaccttttcaaggggtttgagtttgttggaaaagcagttaactggggggaaatggacagttatagataaggaatttcctgtacaccagattggaaatggagtgaaacaagccctcccatgccatgtccccgtgggccacgccttatgtaagaatatttccatatttcagtgggcactcccaacctcagcacttgtccgtagggtcacacgcgtgccctgttgctgaatgtatgttgcgtatcccaaggcactgaagaggtggaaaaataatcgtgtcaatctggatgatagagagaaattaacttttccaaatgaatgtcttgccttaaaccctctatttcctaaaatattgttcctaaatggtattttcaagtgtaatattgtgagaacgctactgcagtagttgatgttgtgtgctgtaaaggattttaggaggaatttgaaacaggatatttaagagtgtggatatttttaaaatgcaataaacatctcagtatttgaagggttttcttaaagtatgtcaaatgactacaatccatagtgaaactgtaaacagtaatggacgccaaattataggtagctgattttgctggagagtttaattaccttgtgcagtcaaagagcgcttccagaaggaatctcttaaaacataatgagaggtttggtaatgtgatattttaagcttattctttttcttaaaagagagaggtgacgaaggaaggcaggaatgaagaagcactgcgtggcctccggtggaatgcacggggcacagccgcgactctgcaggcagcttcccccccatgccagggctctgcgccgtcatgtgagacttaaaaaaaaagttgaatgacttcgtgatactttggacttctaaattaaatttatcaggcataaattatgtagaattagaggctttgaaaataatactggtaggttgctcaaaggttttgaaagagaaatcgctaggtaggttactatctggctaatccatttcttatccttgacaatttaattcatatttgggaaacttttagggaaatgaaaaataaaagtcactgagtctgggtgacattttttaagaataatataaattcagtttcaaactcttctcacattaaaattttgctgtgaactcttactaaaatgagttttaggttctgtaagtggaaaaatgtgcttttattttatgggccatttttaccacaactaatcttgccttggattactaagcatctcctgcgatcccacagaggactgtggtggccacaggagctgaaagcagaagagtgggatttgatgccaggcagtggagtggcctcagccccagattgtacctcctgccctgtaggaggggagggggcaaagccttctgacttcacctttgtttgacctatgtatggaacttacttttactttttgccttaaatttttaatgaaatgcaaattttctgtgatggggttctctctctctttttttcggggggtggagtcactaataaatttgcaaatgaagttaaagacaaggcaaccatctggcttatgctatataatacttcatttaaagaagaaaggaaaagcaaatgcacttgcagcttttgaggtctcagcaaaaatgggcatgtgtcttttttgaagtttagaaatatcctaatctatttttatttatctaaaagtaagtgttttccggctgataaggctaaccctacccaggaaaggattgataactaaataaatttcctctgttttcccatgcattgaaattatgttggctgagcatggtggctcacacctgtaatcctagcactttgggaggccgaggtgggcggatcacttgaggtcaggagttggagaccagcctggccaacgtggtgaatccccgtctctactgaaaacacaaaaattagacgggcatggtggcgcacacctgtaatcccagctacttgggaggctgaggcaggagaattgcttgaacctgggaggtggaggttgcagtgagctaaaattgtgccactgcactccagcccgggtgacagaggaagactccgtctcacaaaaaaaaaaaaagaaaaaagaaattatgccagctgtttaatgtgagagaatagaaagaatgttcatggaatgtacctgccctgtaaaatgtttgatcattttcattaatgttgcagagaatccgactgctattaagagaaagtgaacaaattaagaatttaaaagacaggttcaggcatgtcataagtgaaaacaagaaggcttaatacaaacttgttgggttttgttcgtgtgtgtgtgtgtgtgtgtgtgtgtgtttttttttggttcagcctatctagccacctacaaataatcacatttctgttacctgaatttatttctcagcctgtaaaccttagtcactgttacctgtttcttgctcagtgaatatgatcttggcactgtcatctagaaagcaagatatttgattggttttctggttccttcgaagataataattccatatccagtttgactgattttcatacccctgaatcaactagttattttcatgaaatggtttttggatatctctcctctagtttggagaagtaataatcacaaagattaatattttgcttctagtacttacagtagaagaattttaaactggtacgtctactcctgttaaatagaaaggggattcgttgtattatgtgcttgcttttttttaatcaatagaataagattcaatgcatatttatgttttatattttccactattcaggtatcatgaaatcactctagagatgatcaatcaacatcatatttatacttttggttaattatatactactcagggaaaaaatgaacaaaaataactactcatccttcaatttcattttcttgaaacagtaagagtataatttggtatgcctcagctgtcaccattttataagtggctcattctgttcttaaagtaagtatttttattggaactcagggtaattgggggaatttatttagcttctaaaatatccggcaggatagagaagatttatttggcttcaaaaatgtctggtgaccacttctcttattagccactactgcccatttgcttcaaaaatatatttattggtctccaccatgtgtgacacacacaggatttccaaacataccacttttgagaaaaatgtgcagtaaaaaggaggtttctagaaagtgacagtaactcacatttaagcactagctgacctaggaggagacctggatcttcattctggttctgcctttcatgagacttaagacttggaggagccacctgtcctgtagaccccaagttcctcagccataagcaaacgggttaatcctaagagttcaggaccagttgggtgtcgtgaacggagccattagcaaggtctgtaggattcaaggacttgggcacattcacagtccacactattgtcatggtcattgacttactacttgagctcaaagccctgacatttcaaaaggttgtcatgataacagtgaaacctctgaatcccttaaatcagaaggcatggcaacatactttttctactggcaatagctcttacaatgagtgtttcataatgaaatagtctctgctgaagaaaacatgttttccttttgctctctctgctttgttggtttctgtgctgtgtggaattggagaagatatatgctctgaaatattttatacagattactgactactggacagggtttaccactatataacatctcaaagttattcaaggatatttaaagcatatttagtttagttacaccttattttaaaccgcagaaaacaatagctttaaaatttttgccattaaaataattataaatttatacttttactcaaggactagatcacagttttaggacaaaaatctctcctatttaaagttcataccttgtaagtatttagtttgtatattcatgaacaaatctggacatttatactttttttgtttccttatcaactgttcacaattattagttaattggtcttaacagttctacattataattgaaagaaaaattacttgagaaaataattgtttcagaatagtgcctactatatctgtgtcagctaaaaatttgtccagagttttagatataagctagtattttgtggagttttatccaggcgttaatagttcttcctggctgaaatttaatataggtgcagaatcctaaataacactgtgagatgtaatcttaactgccctcaataccttataaaactgctgcatttaacccagtgtgcatttaatgagtggctggtcgttgatacactcatcttagatgctgaaatttctgttttctccagcccttgtaaaagtgggtttcttgatgaacgcgtgctcccaatgctgaagcaaaagatttgcatttaaggagagaaatacaccctgaaatttgagtttgaaagattagaacatagagggtctctacagtgtttttctgcaacaccaagtagtcaaatctatttatagaaactctgattacaacagaaattttaaaatgaaattttccacatcggtattttgtaggaaagctcttataatcaatgcttaagctgctttttgaggcttttcttgtacagaggttgcagccaattacattttaattggtaggctgctgaataatgtttttgtatgttttaaaataatatttattttaataggttttttaacattatgcaaatcccaataaagaactgacacgttccataggccattgactgggaaattttgtgaaacacagcctaaatacacagtttttacaccaactaatttgtcttgcctttaaaactgattataactcttctttaagtacaacttttataaagaaaaaatacaacactaagactgtatgttctgtaaattatagtgtgatgacccatgcagaaccgctgtctgaagcttactcagcgattcatagccatctccagccatgttttatcaaatcacacactaaaaataaatggaaatgctacagtgaaaaaccaaaagttacagagcaacataagtaaaatgactaggcagtttcttagtaacatgtttgaaatgggaaaggtgactgactgcctttcaccagagtcttagctgtttcacgttcactattttaggttaattttcttgggaaatcaatttgaatattcccccctgtccttttgcattaaaggacgaaaatatatgttgagagtttgacagactttttaaatatgcctctttcccaattttatgtatttttggttctgcgcacacagatttatcaatgaagtacatttgcctctggctttatcacaaggaaaaaggaatcaaacattgaacacaaatgtgttccaaaccagtcttgtccatcttgtcacttttatgtgactgctcctctgaaccagaaggggcacgatagaaggccataggaatgaaagtaaatcattcaggtgaagtgagaaattcttccatatacagagtgaaaatgtgtgatttcattcctgccttcctttaaacgttgtcttgatctctgcctagtagtagttgagccctcagtcgcccaaacatgaggagagacccaactccagcagccagaatttagtatttacatttgccttcccaagttgagaatagaatgtggtgttctgtgctttctgtttttattattccaaaatatttttttaaagaagtgttatttttcaacagattcataaattagttcctgatgtacggtaaattaaaactcccactgtgtcagtcaaactgagatgtgctcatttcataaccactcatttctagtctgtcagagctgcactggtggcttattgctggtttttaaaggtgtttttaacttacatgtaacatgtttaggacatgttttttttttctaatttgtgtgtctttacaactgattaaacagtagtttaaaaatatgcgtg

SEQ ID NO: 7223 - DNA, 4187 bp, Homo Sapiens
  misc_feature (1)..(2): n is a, c, g or t.
  XM_001129302
nngggccggaggcttaggggctctggcagccccagccgccccagcctcacgctgtctgatccgccaaacctcagcaacctggaggagttccctcccgtaggctcggttcccccgggccctacagggacgaagccttctcgcaggatcaacccaactccggtgagcgaagagcggtcactctccaagcccaagacctgcttcacctcacccccaatcagctgtgtccccagttcccaaccctcagccctggacactagcccttggggccttggccttcccccagggtgcagaagtctgcaagaggagcgagagatgctcaggaaggagcgctctaagcagctgcagcagtcacctacccccacctgtcccaccccagaattggggtcgcccctccccagccggacaggaagcctcacagatgaacctgcagaccctgccagagtgtcttcccgccagcgcctggagcttgtagcccttgtttactcctcgtgcattgctgagaacctggtaccaaacctcttcttggagcttttcttcgtctttcagctcctcactgcccggaggatggtgactgccaaggacagcgaccctgaactaagtccagctgtcctagattccctggaaagtccactgttccaaagcatccacgattgtgtcttctttgcagtgcaggttttggagtgtcactttcaggttctttccaacctggacaaagggaccttgaagctgctggctgagaatgagcggctgctgtgcttctcaccagctctgcaaggccgccttcgagctgcctatgagggcagtgttgccaaggtctctctggtgatgcctccctctactcaagctgtctcctttcagccagagactgacaatcgtgccaacttctccagtgaccgagcctttcatacttttaagaaacagagggatgtgttttatgaggtgctgcgagagtgggaagatcaccatgaggagcctggctgggattttgagaagggcttgggcagcagaatcagggccatgatgggtcagctctccgcagcctgcagccacagccactttgttcggcttttccaaaaacaactactccagatgtgtcagagccctggtggtgctgggggcaccgtcttgggcgaggccccagatgtgttgagtatgctgggagctgacaagctggggcggttgtggcgcctacaggaacggcttatggctcctcagagcagtggggggccctgcccaccccccaccttcccaggctgtcaaggcttctttagggacttcatccttagtgccagcagcttccagtttaaccagcatctcatggacagtctgagcttgaagatccaggagctcaatggtcttgccctgccccagcatgagcccaatgatgaagacggggagtcagacgtagactggcagggtgagcggaagcaatttgctgtggtgcttcttagcctgagacttttggctaaattcctgggctttgtggctttcctgccataccgggggcctgaacctcccccgaccggtgagcttcaggactccattctggccctcaggagccaggtccctccggtcctggatgtgcggactctgctgcagcgagggctgcaggcccgccgggcggtgctcaccgtgccctggctggtggagtttctctcctttgctgaccatgttgttcccttgctggaatattaccgggacatcttcactctcctgctgcgcctgcaccggagcttggtgttgtcgcaggagagtgaggggaagatgtgtttcctgaacaagctgctgctacttgctgtcctgggctggcttttccagattcccacagtccctgaggacttgttctttctggaagagggtccctcatatgcctttgaggtggacacagtagccccagagcatggcttggacaatgcgcctgtggtggaccagcagctgctctacacctgctgcccctacatcggagagctccggaaactgctcgcttcgtgggtgtcaggcagtagtggacggagtgggggcttcatgaggaaaatcacccccaccactaccaccagcctgggagcccagccttcccagaccagccaggggctgcaggcacagctcgcccaggcctttttccacaaccagccgccctccttgcgccggaccgtagagttcgtggcagaaagaattggatcaaactgtgtcaaacatatcaaggctacactggtggcagatctggtgcgccaggcagagtcacttctccaagagcagctggtgacacagggagaggaagggggagacccagcccagctgttggagatcttgtgttcccagctgtgccctcacggggcccaggcattggccctggggcgggagttctgtcaaaggaagagccctggggctgtgcgggcgctgcttccagaggagaccccggcagccgttctgagcagtgcagagaacattgctgtggggcttgcaacagagaaagcctgtgcttggctgtcagccaacatcacagcactgatcaggagggaggtgaaagcagcagtgagtcgcacacttcgagcccagggtcctgaacctgctgcccggggggagcggaggggctgctcccgcgcctgtgagcaccatgctcccctcccctcccacctcatctccgagataaaagacgtgctctccttggccgtggggccacgggaccctgacgagggagtctccccagagcatctggaacagctcctaggccagctgggccagacgctgcggtgccgccagttcctgtgcccacctgctgagcagcatctggcaaagtgctctgtggagttagcttccctcctcgttgcagatcaaattcctatcctagggcccccggcacagtacaggctggagagagggcaggctcgaaggcttctgcacatgctgctttccttgtggaaggaagactttcaggggccggttccgctgcagctgctgctgagcccaagaaatgtggggcttctggcagacacaaggccaagggagtgggacttgctgctattcttgctacgggagctggtggagaagggtctgatgggacggatggagatagaggcctgcctgggcagcctccaccaggcccagtggccaggggactttgctgaagaattagcaacactgtctaatctgtttctagccgagccccacctgccagaaccccagctaagagcctgtgagttggtgcagccaaaccggggcactgtgctggcccagagctagggctgagaagtggccctgccttgggcattgcaccagaaccctggacccccgcctcacgaggaggcccaagtgcccaatgcagaccctcactggttggggtgtagctgggtctacagtcagacttcctgctctaagggtgtcactgcctggcatcccaccacgcgaatcctagaggaaggagagttggcctgatttgggattatggcagaaaagtccagagatgccagtcctggagtagaagaggtggtgtttgtttatctcttggatactaaatgaaatgaggtgtgtgggcttgtcaacacagaattcaagcctcatttgctatcccagcatctcttaaaactttgtagtcttggaattcatgacagaggcaaatgactcctgcttaacttatgaagaaagttaaaacatgaatcttgggagtctacattttcttatcaccaggagctggactgccatctccttataaatgcctaacacaggccgggtctggtggctcatgcctgtaatcccagcactttgagaggcctgaggtcggcggactgcctgaggtcaggaattcaagaccagcctggccaacatggcaaaaccccatctctactaaaaataaaaaaattattagctgggcatggtggtgtgtgcctgtaatcccagctactcaggaggatgaggcaggagacctgcttgaacctggaggtggaggttgcagtgagccgaggtcgcaccactgcactccagtctgggtaacagagcgagactttctagaaaaagcctaacaaacagataaggtaggactcaaccaactgaaacctgactttccccctgtaccttcagcccctgtgcaggtagtaacctcttgagacctctccctgaccagggaccaagcacagggcatttagagctttttagaataaactggttttctttaacaagggcttgatgtctaa

SEQ ID NO: 7224 - DNA, 2107 bp, Homo Sapiens
  XM_001129412
ccccagaaaggtctgggctgtgcgtgcttcaggtaacctcccttgaccttcaggagaacgagaaggctgcctgatcagagagtctctgaagaagattctgtggctacaggcttcagcagagtgtgagggagaccccggttatttcctcagctgtttccaccaaatcctcctgtctttcgtggccaacaccccaggcaaggcttggggcccccgtctgctgctggacgagccatgaagaagaagttagtggtgctgggcctgctggccgtggtcctggtgctggtcattgtcggcctctgtctctggctgccctcggcctccaaggaacctgacaaccatgtgtacaccagggctgccatggccgcggatgccaagcagtgcttggagattgggagggacacactgcgggacggtggctctgcagtggatgcagccattgcagccctgttgtgtgtggggctcatgaatgcccacagcatgggcatcggggttggcctcttcctcaccatctacaacagcaccacaggaaaagctgaggtcatcaatgcccgcgaggtggcccccaggctggcctttgccagcatgttcaacagctcggagcagtcccagaagggagggctgtcggtggcggtgcctggggagatccgaggctatgagctggcacaccagcggcatgggcggctgccctgggctcgcctcttccagcccagcatccagctggcccgccagggcttccctgtgggcaagggcttggcggcagtcctggaaaacaagcggactgtcatcgagcagcagcctgtcttgtggtatgtgttctgccgggatagaaaggtgcttcgggagggggagagactgaccctgccgcggctggctgacacctatgagatgctggccatcgagggtgcccaggccttctacaacggcagcctcatggcccagattgtgaaggacatccaggcggctgggggcattgtgacagctgaggacctgaacaactaccgtgctgagctgatcgagcacccgctgaacatcagcctgggagacgcggtgctgtacatgcccagtgcgcggctcagcgggcccgtgctggccctcatcctcaacatcctcaaagggtacaacttctcccgggagagcgtggagacccccgagcagaagggcctgacgtaccaccgcatcgtagaggctttccggtttgcctacgccaagaggaccctgcttggggaccccaagtttgtggatgtgactgaggtggtccgcaacatgacctctgagttcttcgctgcccagctccggtcccagatctctgaccacaccactcacccgatctcctactacaagcccgagttctacacgccggatgacgggggcactgctcacctgtctgtcgtcgcagaggacggcagtgctgtgtccgccaccagcaccatcaacctctactttggctccaaggtctgctccccggtcagtgggatcctgttcaataatgaatggacgacttcagctctcccagcattcaccaatgagtttggggcacccccctcacctgccaatttcatccagccagggaagcagccgctcttgtccatgtgcctgacgatcatggtgggccaggacggccaggtccggatggtggtgggagctgctgggggcacgcagatcaccacagacactgcactggccatcatctacaacctctggttcggctatgacgtgaagagggccgtggaggagccccggctgcacaacaagcttctgcccaacgtcacgacagtggagagaaacattgaccaggcagtgactgcagccctggagacccggcaccatcacacccagatcgcgtccaccttcatcgctgtggtgcaagccatcgtccgcacggctggtggctgggcagctgcctcggactccaggaaaggcggggaacctgctggctactgattgctccaggcagacaaggctgacaagcaatccagggacaagatactcaccaggatgaggaagaggactttgggggacgggcttcccctgtgagcagcagagcagcataataaatgaggccactgtgccaggctccaggtggcctccctggcctgtctccccactc

SEQ ID NO: 7225 - DNA, 4543 bp, Homo Sapiens
  XM_001129527
atgcgcctgctgtccaaggagcagaaacagaccctggggcaagagaagccagagtgccagttcagggagagctgctgccgccttctgtcctgcaggaaagaagacttgaacaccctgcgcccctctcagagcctccggggtcttcatgcgagcagtttatcacggttctttcgtcttaaaccctcttactatttcagcaaacaccctctcctcagcctggtcaacccctctgcccaacccgagtgggccccgaaggaacaactcagcaaaggcgcgcgcagtgaacagacggaggaggggtggctcctcgctgagctgaaggctgcggcgacgaaaataaacagcatggttcctgctctccacgaacctggcgctgcagactgccgctcgggcctgggggcggggcaaggtctaggggccggggcaacgacgggaggcgggagcgccgcactgccttggaggcggggcaacgcttggaggcgggaacgcggcacgcgagcgttgggggccctaagcgtcgcgacctgggggcttcggggaggtagccgtggacgtgggcagagcgcgggcctcgtggtgtgcgggcactgtgggccgggcgagccccttcccgcccgtgtggttgacatcatggacatatgtgagtccatcctggagaggaagcggcatgacagcgaaaggtctacttgcagcatcttggagcagacagacatggaagctgtcgaggctcttgtttgtatgagctcctggggtcaaagatcccagaaaggtgacctgttgcggataagacccctcacgcctgtctctgactctggggatgtcaccaccactgtgcatatggatgcagccacacctgaactaccaaaagacttccattctttatcgactctgtgcataactcctcctcagagccctgatctcgtggagccatcgacaaggacacctgtttctccccaagtaacagattccaaagcatgtacagccacggatgttctccagtcctctgccgtagtggccagagctctgagcgggggcgcggagaggggcttgctgggtttggagccagtgcccagctctccctgcagggccaaggggactagcgtgatccgacacactggggagagccctgctgcctgctttcccaccatccagactccagattgccggctttctgacagcagagaaggagaagagcagcttctgggacactttgaaactttgcaggacacacacctcacggacagtttactcagcactaacttggtgtcctgtcagccctgcttgcacaagtctggtggcctgctgctcactgacaaaggccagcaggcagggtggcctggtgcagttcagacttgctcaccaaagaattatgaaaatgacctgcccaggaaaaccacccctctgatttctgtctctgtccctgctccccctgtcctttgccagatgatccctgtgactggacaaagtagcatgttaccagcttttttgaagccccctccccagttgtctgtggggactgtgagacccatcctagctcaggctgctccagcgcctcaacctgtgttcgtgggacctgctgtgcctcagggagctgtgatgttggtcctgccccagggagccctccctccgcctgccccctgtgcagccaatgtcatggctgccgggaataccaagttgttgccccttgcccctgctccagtgttcatcacctctagccaaaactgtgtccctcaggtagacttttcccgaaggaggaactatgtttgcagcttcccaggttgccggaagacctacttcaaaagttcccaccttaaggcccatcttcgcactcacacaggggagaagcctttcaactgcagctgggatggctgtgataaaaagtttgctcgttcggatgagctgtcacgccaccgcagaactcacacaggggagaagaagtttgtgtgcccggtgtgtgaccgacgtttcatgcgcagtgaccacctgacgaagcatgcccggcgccacatgacgaccaagaagatcccaggctggcaggcagaggttggcaagctgaacagaatcgcctctgcagagagcccggggagcccactggtgagcatgccagcctctgcctgaaaggtccattaggacatcactcatgggatttttaaaaagcctctttccaggaatggaactgatggattcctctcccactgcctcacccaaaaaaaacggtcttggcggcctaggggaagatcggggagctggttttgatgaaagtatgttaacttttcttttccacttgggaccctgttcagtatcttttgtagtttcagaagtttttttgttttggttttttttttttaaagaaatggtagaaaatttgataatctgaatcaccagcattcaaacaaatatttcggcaataaagtttacaaaatctggatttttacaaccttttctattgatgttttgtagaaataagacagggtactaatttttatactggtttttagaaaaatatttatattgttggtgctcaaatcaccaatttctagctagatcattttgcagccttcttttcagtgtttaataacaaagtttttcctaatggcccttcttttagtaaactggacatgttattccactacaaaaaccacaagttatctggccttttagatctttttggaatcggacctggttgagtaaggacctcttaaaagggaaaaataaattttgccgtcagcttcttcataacgttttcaaggaaattctaggcaatcattcctgtcaccaaagaactaaaattttggttgactggaactagtgagctgtgtccatggtgtgtcatgaaggatgtaccccagagagtaacatgagccactgggcagatcccagggaccagtacttgctgcaggatctagtctgtaatagtcttggccatggctctgctgaaagcaagccattcagtttcttgtttgtacctaaaacaccaaaaaagaaacactcaaatccagctgctttgtcaattgtcagttctgactccttttgctgtggccttatccgtactatattgtgggtagagtaacttctcagaaaaaaaggaaatgtctgtattggttggatgaaactccaccagagcacagcttagctggggcgagatgcatgtgaaggcaggcagtgccaagattccgcttcctttgtttgccaaatactagaaacacaaggaaatgcaagttacgctaaatggcagtaatactacccaactgcctttctgttcattttgtttgaaggaaattgttttgaccaaacagaaaattacttggaatggtgtgttttacagtctacctagaaaatagatggacaatatttttcaactgtatgagcacgtagataaccgagagaatgtggccacctgtgttcaagaagccactgatactggtttttgttaaacattggaagttcaggcaatggaataaatgtaggaacatacagaatgttgcactaatttggtagcctgggaattttttttattgtgcagtatgtatttaaattttgtctatgttaattaccagcatttacctttatttaaatgatggtaaggtggaatattgaataaaattaggttttgtgttttgttctttgtagtctgataaaatctccacctggtcattcattgtgtgtgacttgatacccgttaacttgccccttagtatcagctgttacttgacacaaatgtgtgtgttattcagaggttttcagtctggacactccataggtgagtgtcgtgtcttcgtgagacagcacagttgtctcatgttgtgcatagttcatgtttcctcaccacccagtcctttctcctgctcatcaaaatcagcatacacatttttgactgtacacactataaatggcatcaaatttggatatttttcttaattatgacatgcaaagtaatgtgagtcctgccagtattctggtggataaggtcttctgagtatttggttgcttgtcacaacattctccaagcagtgatatttctaaagaggagatacatgttgaaaacggttttaatttacacttccatttcctgattacatttggaaatactttgtgtaaaccatcccccttccacctccatttgtctgttgaaagattttaagttggaaacagttcctgtctgaaaactcttctgagaaccacaaaccttgtgtatggattcggcatggagccctcagctggcggctctgggtgctgacggccgctggagaggtgggctcccctcgtgcactttattgcctgggcagttttgcttgatcttttgtgactttgagccttttaagtagtttgaatgataagacttaaaatgtttcataattatgttttatgtaacagactttgacattatttaaacgagcatgtgtaatgtaacttttctctttgaatcatataaaacttgattttacattggatgtgtgtcctgtgtcatttaactgtacctggtggcctaagtatacctagagactttttggaagaatctataaaattcattgtgtattggctc

SEQ ID NO: 7226 - DNA, 1821 bp, Homo Sapiens
  XM_001129630
atgggcgctggtttgcggcgcctgcgcgttctcttgtttacaggaggcacgtggggcgcgcagggtgtccaggatgtggaggtgcacttggaggaccagatggtcttggtacacaccactctacccagccaggaggtgcaggctctcctggaaggcacggggcggcaggcggtactcaagggcatgggcagcggccagttgcagaatctgggggcagcagtggccatcctgggggggcctggcaccgtgcagggggtggtgcgcttcctacagctgacccctgagcgctgcctcatcgagggaactattgacggcctggagcctgggctgcatggactccacgtccatcagtacggggaccttacaaacaactgcaacagctgtgggaatcactttaaccctgatggagcatctcatgggggcccccaggactctgaccggcaccgcggagacctgggcaatgtccgtgctgatgctgacggccgcgccatcttcagaatggaggatgagcagctgaaggtgtgggatgtgattggccgcagcctgattattgatgagggagaagatgacctgggccggggaggccatcccttatccaagatcacagggaactccggggagaggttggcctgtggcatcattgcacgctccgctggccttttccagaaccccaagcagatctgctcttgcgatggcctcaccatctgggaggagcgaggccggcccatcgctggcaagggccgaaaggagtcagcgcagccccctgcccacctttgagcaggacctcaccttggctctgttgctgtcctccagggcgagcactttccacttccagagggggccagagggactttgcctgcccagtctttggagagctcagtacagggcaggagctgctgtggtgttcccttggcaaatgaaagttttattttcgtttgggacttggtgttttgtgcttgtctccatgccccttatgggcttggtgaacatagctctgcttctttcctttgtatcagggccaccccttagcattggagccaaacaaacctgaattcaaacctacacacacactgaagtccccatcttcctccttggagccataatgaagagccactacagtcaaatttctgtttgtggcctcccccaacccctcactatggctgattggaaccaaaatggacacctgacccatggtggcccatgctttccctgagaaatcagggcagatccagctttagttttttcctgtggttggacccataacatgggaatatgggaagttttggtggccctcttctccctgccttattgactgagcatcagaaaaagccagtcggctaaggaggaaaaatgaggcagggagaatctaagagttgctggagaatcccagtcactctggagtcccctctctgagcctttcgtgaggccagctgcctcctgcctgggattgaagagatgctcccgaatcctcctaatgcatccccctgttaaaataatctggcttgaggctgggcacggtagctcacacctgtaatcccagcacttcggaaggccaaggcgggaggatctcttgagcccaggagtttgagaccagctgggggaacagagtaagaccctgtctctacaaaaaaaaaaaatttaattagctgggtgtgatggtgcatgcttgtggtcccagctatttgggaggctgaggtgggaggattgcttcagcctgggaggttgaggctgcagtgaaccatgatcacgccactgcattccagcctgggcaacagagcaagactccatctcaaaaaaaaaacaaaaccaaaaacaaacaaa

SEQ ID NO: 7227 - DNA, 1432 bp, Homo Sapiens
  XM_001129635
cctttctttgcggaatcaccatggcggctgggaccctgtacacgtatcctgaaaactggagggccttcaaggctctcatcgctgctcagtacagcggggctcagatccgcgtgctctccgcaccaccccacttccattttggccaaaccaaccgcacctctgaatttcttcgcaaatttcctgccggcaaggtcccagcatttgagggtgatgatggattctgtgtgtttgagagcaacgccattgcctactatgtgagcaatgaggagctgcggggaagtactccagaggcagcagcccaggtggtgcagtgggtgagctttgctgattccgatatagtgcccccagccagtacctgggtgttccccaccttgggcatcatgcaccacaacaaacaggccactgagaatgcaaaggaggaagtgaggcgaattctggggctgctggatgcttacttgaagacgaggacttttctggtgggcgaacgagtgacattggctgacatcacagttgtctgcaccctgttgtggctctataagcaggttctagagccttctttccgccgggcctttcgcaataccaaccgctggttcctcacctgcattaaccagccccagttccgggctgtcttgggggaactgaaactgtgtgagaagatggcccagtttgatgctaaaaagtttgcagagacccagcctaaaaaggacacaccacggaaagagaagggttcacgggaagagaagcagaagccccaggctgagcggaaggaggagaaaaaggcggctgcccctgctcctgaggaggagatggatgaatgtgagcaggcgctggctgctgagcccaaggccaaggaccccttcgctcacctgcccaagagtacctttgtgttggatgaatttaagcgcaagtactccaatgaggacacactctctgtggcactgccatatttctgggagcactttgataaggacggctggtccctgtggtactcagagtatcgcttccctgaagaactcactcagaccttcatgagctgcaatctcatcactggaatgttccagcgactggacaagctgaggaagaatgccttcgccagtgtcatcctttttggaaccaacaatagcagctccatttctggagtctgggtcttccgaggccaggagcttgcctttccgctgagtccagattggcaggtggactacgagtcatacacatggcggaaactggatcctggcagagaggagacccagacgctggttcgagagtacttttcctgggagggggccttccagcatgtgggcaaagccttcaatcacggcaagatcttcaagtgaacatctcttgccatcacctagctgcctgcacctgcccttcagggagatgggggtcattaaaggaaactgaacattgaaaaaaaaaaaaaaaaaaaaaa

SEQ ID NO: 7228 - DNA, 3621 bp, Homo Sapiens
  XM_001129650
atgggcagccccgagggccgcttccactttgccatcgaccgtgggggtaccttcacagacgtctttgcccagtgcccaggggggcacgtgcgggtcttaaaactgctctcagaggaccctgccaactatgcggacgcgccaaccgaaggcatccgccgcatcctggagcaggaggccggcatgctcctgccccgggaccagccgctggactccagtcatatcgccagcatccgcatgggcaccacagtggccaccaacgcactgctggagcggaagggggagcgggtggcgctgctggtgacacgtggcttccgagacctgctgcacattggcacccaagcccgtggggacctctttgacctggccgtgcccatgcctgaggtgctgtatgaagaggtgctggaggtggacgaacgcgtggtgctgcaccgtggagaggcgggcaccgggacgcctgtgaaaggccgcacgggggacctgctggaagtgcagcagcctgtggacctgggggccctgcgtgggaagctggaggggctgctatctcgaggcatccgcagcctggctgtggtgctcatgcactcgtacacgtgggcccagcatgagcagcaggtgggtgtgctggcccgggagctgggcttcacgcacgtgtcactgtcctcggaggccatgcccatggtgcgcatcgtccctcgggggcacacggcctgtgccgacgcctacctcacgcccgccatccagcgctacgtgcagggcttctgccgtggcttccagggccaactcaaggatgtgcaggtgttgttcatgcgctccgatggcggcctggcgcccatggacaccttcagcggctccagtgctgtgctctcgggcccggccggcggcgtggtgggctactcagccaccacctaccagcaggagggtggccagcctgtcatcggctttgacatgggaggcacgtccacggatgtgagccgctatgctggggaattcgagcacgtcttcgaggccagcacagctggcgtcaccctccaggccccgcagctggacatcaacaccgtggcagcgggagggggttcccgcctcttcttcaggtctggcctctttgtggttgggcccgagtcagcaggagcccacccaggacccgcctgctaccgcaaagggggccctgtgacagtgacggatgctaatctggtcctgggtcgcctgctgcctgcctccttcccctgcatttttgggccgggagagaaccaaccactttcccctgaggcctcccgcaaagccctggaggctgtggccactgaggtcaacagcttcctgaccaacgggccctgcccggcctccccgctgagcctggaggaggtggccatggggttcgtgcgcgtggccaacgaggccatgtgccggcccatccgtgcactcacgcaggcaagaggccatgacccctcagcccatgtgctggcctgctttgggggagctggtgggcagcatgcatgtgccatcgcccgggccctgggcatggacacggtgcacatccacaggcacagtgggctgctgtcggccctggggctggccctggctgacgtggtgcatgaggcacaggaaccctgctccctgctctacgcgcctgagaccttcgtgcagctggaccagaggctgagccgcctggaggagcagtgtgtggatgctctgcaggcccagggcttccccaggtcccagatcagcactgagagcttcctgcacctgcgctaccagggcacggactgtgctctgatggtgtctgcccaccagcacccagccacagcccgctcgccccgtgcgggggacttcggggcagcctttgtggagcggtacatgagggagtttggctttgtcatacctgagcggccggtggtcgtggacgatgtgcgagtgcggggcaccggccgcagtggtcttcgcctcgaggatgcccccaaagcccagaccgggcctccccgggtggacaagatgacccagtgctactttgaggggggctaccaggagacccctgtgtacctgctggcagagctgggctatgggcacaagctccatgggccctgcctcatcatcgacagtaacagcaccatcctggtggagccaggttgccaggcagaggtgaccaagacaggggacatctgcatctccgtgggggccgaagtccccggcacagtgggcccccagctggaccctatccagctgtccatcttctcacaccgcttcatgagcattgctgagcagatgggccgcatcctgcagcgcacagccatctccaccaacatcaaggagcgtctggacttctcctgtgccctctttgggcccgatggggggctggtgtccaatgccccccacatccctgtgcacctgggtgccatgcaggagacggtgcagttccagattcagcacctgggggccgatctccaccctggcgacgtgctactgagcaaccatcccagtgccgggggcagccacctgccagacctgactgttatcacaccggtgttttggccgggtcagacgcggcctgtgttctatgtggccagccgagggcaccacgcagacatcgggggcatcacaccaggctccatgcccccccactccaccatgctgcaacaggagggtgccgtctttctgtccttcaaacttgtccaggggggcgtcttccaggaggaggcggtgacggaggccctgcgggcgccaggcaaggtccccaactgcagcggaaccagaaacctgcacgacaacctgtcggacctccgtgcccaggtggcagccaaccagaagggcatccagctggtgggggagctcattgggcagtacggcctggacgtggtgcaggcctacatgggccatattcaggcaaacgctgagctggccgtgcgagacatgttgcgtgcctttggaacctcccggcaggcccggggcctgcccctggaggtgtcctcggaagaccacatggacgacggttcccccatccgcctccgtgtgcagatcagcctgagtcagggcagcgctgtgtttgacttcagcggcactgggccggaggtgtttggtaatctcaacgcaccgcgggccgtaaccctgtccgccctcatctactgcctgcgctgtctggtgggccgcgacatcccactcaaccagggctgcctggcgccagtgcgcgtggtcattccccgaggctccatcctggacccgtcgcccgaggcggcggtggtgggcggcaacgtgctcacgtcgcagcgcgtggtggatgtcatcctgggggcctttggggcctgcgccgcctcccagggctgcatgaacaacgtgaccctgggcaacgcccacatgggctactacgagacggtggcgggcggcgcgggcgcgggtcccagctggcacgggcgcagcggtgtgcacagccacatgaccaacacacgcatcaccgaccctgagatcctggagagccggtacccggtcatcctgcgccgcttcgagctgcggcggggctcggggggcagaggccgcttccgaggcggcgacggcgtcacccgcgagctgctctttcgtgaggaggcgctgctgtcagtgctgaccgagcgccgcgccttccggccatacgggctccac

SEQ ID NO: 7229 - DNA, 7296 bp, Homo Sapiens
  XM_001130020
atggtggagcagggagacgcggcgccgctgctgcgctgggccgagggccccgccgtctccctgccgcaggccccgcagccgcaggcgggaggctggggccggggcggcggcgggggcgcccggccggccgcggagccgccccggaggcgggagcccgaggagccggccgccccggaggtgctgctgcagcccgggcgcctggagctgggcgacgtggaggaggaccaggtggtggccgtgttcgtggtcaccttcgacccccgctcgggaaacatggtagaatggtgcttacctcaagatattgaccttgaaggtgttgagttcaagtctatggccagtgggtcccataaaatccaatctgatttcatctatttccgaaaggggcccttcttcggcctggcctgctttgccaacatgcccgtggagagcgagctggaacgtggcgcgcggatgaagtctgtgggcatcctctctccctcctacacactgctttaccgctacatgcacttcttggagaaccaggttcggcaccagttggagatgccaggacattactctcatctggctgccttctatgaggacaaaaagggggtgctccatgctggtcccggcagaggcagcagcctgccccctgtctactggctgccttccatccaccgatacatgtaccctgagatgaagatcacacacccagctggctgcatgtctcagtttataaagttctttggagaacagatcctcatcctctggaaatttgccttacttcgaaagcgcattttgatattttctcccccacctgtgggcgtggtgtgctatagagtgtactgctgctgctgcttggccaacgtttcactgcctggcatcgggggcaccattcctgagtccaaacctttcttctacgtgaacgtggctgacatcgagagcctggaggtagaggtgtcctatgtggcctgcaccacagagaagatattcgaggagaagcgggagctgtatgacgtctacgtggataaccagaatgtgaagacacaccacgaccacctgcagccgctgctgaagatcaacagtgctgacagggagaagtaccgccggctcaacgagcagaggcagatgctgttgtactcccaggaagtagaagaagactacaacccttgtgaagaggacctcttcgtgctgtttttcctagaacaaaacaaccggatatttcagactttgttggaggtgtctgccagtcaagacaaaactctgacagcagagcatgcccggggcatgggcctagacccccaaggagaccggagctttctcctggacctgctggaggcctatggcattgatgtcatgctggttatcgacaacccctgttgcccgtaggaggagccaacaggactgggagccgcttcacgtgggatgtcagcagcccggagttcaccccagggccccagagggcctcattttttattaagttgacacaaaggaatattgtttatactttccaacaaacataatttttgcaatttcctttctgcccttttccctagagataaggtgagatcaccttggttttgtgtcctgccatgttaggatattggaatctgccactttctcccagagctgctggtcctctgggcttggtcatgggagttgtatcactaggagtaggctgagctctggaaacattgggatggactgttcagaaagtctgtgtggtctttgtcccttgatgtatttgagaataagacaaccacctgtcccctgtggccttagatgttcatctgcctaaaggcagaaactagaccagatgatcttttaaggtttttagtagttctaggagtctatagtcttgggatcaaatcccttttcttgttcattagggcaactttatgtcttctctgtttacttgagtagggaccacaaagagggaaaaaaggatgtttctgacaccaaatatgagcttatcttatggtcagaatgaaagaggttgcttatcagtgagctgaaaactaaaattatagaatgaagcctggaaaccttcctcaaagtaacttgatggtggccatgcaatgtaatgttcctctttgtctgaaccttcctcttcttgggatgaattggtgaattgctaagggccaatgctggccttggagcttgcaagcaaattaattttccagtttagtctcttaagggttcaataatgctcttggagtaagttgggtatttttaaaggctgaagtttggactaccggaggatagagcaattgaagttcgagcaggatggagaagccactctaagtctcttcatctggacacgaattctctggaggcattagcagcagcacctctgggtcaacacagatttactggattccaaaatctagcaaggatctgagctggttaactcagagggtggagcatgatgctaacaagacggtttatcattttggacccctcacaaacacacttctctttagcagaggtgacattccttaggctaaataattggatccagggacataacagatttgttgagagaaaatgtggcagtgccttcacccgggacagtggtcaggaagccctgagcatccctgatggatttatccatcctcttctgaagtgctctgctctaggctgggtcctgttgccacctgcctgttctctggttggcttttgcaggagggcagcttacgtgtttgtcaaccagttagaaagccagttcctgtgggtcgagtttaggcctttttggccatagttgagaattttgacttgggatactgggttgttggtgacaaataatgtcttccttttcccccttcccgcctggctcggttatgggaatagccatcagtgcatccatgtctgtgaccaacacccagccagactaatgtacacagcagggagaaataacattcaaatggtggttcacacatctcatctcaagataagattcttagggttcactgctttattcaaaagtgttttcactgtagctccttcatatggaatatcaaaactgaagaaattcacatgtggaaatgcaaatagacattgattaatcaaggtagcatctttatgtaaatatataaataagtttgggcattgaaatgtaaactgtacagctaatagacttttctcctctgcaatgtgggttgctgtcatttcagtaatgtgtatgtttacaaaagaaaaaaaaatctgtgtttcgaggttgaagcctcaccttttattctcctttacatgcaaccctctcctcttgcctctcaagggttgaggggtcctttctgtcaagtaatggttatttttcgtggtatcctgaggttcagggtgttttaagctgggggtaggtggttagaggcaggagtagaagtgaaaggaaaggtctgattctcctagaggacacaagaagacctcctttttctggaattagggaatctgccggaaggagctgtttgaggcatttctgctctgagccttctatatgcaaacactgcagttttaactgcaagctcagaagtgctggtgtaaacatagcagggtgagaatgaagttcctgttttttcctttgaatggtgagtcagggcttctgggttcccttaactttgtgcttgtctcggtagctttctgtctcacatctccacgtgtccaccctcctgctcatgcagagggccagggtatgggtggccccagaggagaacgtgccagtgaggcagtgccatgtttcaggtcataggggccttgggctcagctgaccccaatgcagaacttctccctttaagagagattccaataaattggtccttccctaccttgccagcttcttcataggaccagaaatcttgtgcagagcctctgcttggctgaacagcgtgtgctttatctcttcagttacctttgccactgttgagcatcctcagagtatgtcttgcctgggctatgaagtggagcctgtggcttcggaaatcacctttcgaagccttgctctatgccagattctgctccccaacatgacagattaacaggcacaacctaggatcctttgctaccagttctctactagggaattccacagtggcagcagaagctaggagccatgtggacctgcttttctgccagtcttgaaatattttctgagaaaccatctgcttttgttcagaagaaagtgctgaacatcgttcacagacttctaggtctgtaagctctttaggggcgggcattatgatgaccaccggcctcctggaggagggttggatacctgtggtgtgacaccttctgccaccatctcctgccgggcctcagccctcgcctgcctgagcaggcctagttctcctgtgaagctgtcagcctgatctcatgccacactgtgaaatgaactatgtgccagtttggaaatgattgctgacctgagatgctggctgggctgccctgttgttcctgaataagtcagaagaagttccaggtgggagtggaattcaggtttggggctcgttggtatccatgcaaaatatgacaaaggcctgttcaagagggcattttcaattctgtaggctcagcagatgatactgcccagcctttgggaaaatgtccagttggcccctggcttaggactctccacaaggagtttgaaatggtagggcttatcccctaccagactaaaagtatggcccaaattatgtgtttagaatttgcttggcctttaaacacgaaccattccctatgcctggtagagaccattccagtgtcagtgtcccacctgggacctgtacagtcctcagtaaattatgattgcaatgaattagaaggcttttgccttccatatccatcatccattatagcatctgtgcttccacctggttagggggagggaagctgaaatcattgatgtatcaatagaagtaatttagcttaggaacttgcatctataacttaccttgttttgttccactttaaagtcaagacaagaaagttaagatagcacacaggtgcacatgcttccagatgccacatgtgaacatttgttgatcatgtgactaccgatgacactttagctagaagataaattaaatcttagctaaatcattgtttttccttctggtggctatgaggatgaatttgctctcagtcttgatgcactgaaagcccttcaaacacagtaaaagatgaaatcactcatctttaaactgaggccttcagggaagcttttgtaaaggacagtaatgaattaggctttcagttttaggacatcaaccctccgagaaaaggcagaaacccgagggaccatttatttcccttcgaaactgtatagcccagggaatggattgagatgctttctccagaccctgtataggtcaaccttgcagaggtaaaggaggaggggcaggtggatgaataaaataggataatgctcagcttggcagtggacttgccttagtgtgatgacaggtctaacatgggcaagacaattagaatggggaccaatatgccaggcatgggcttttatctccctagtagatcccaagctagtaggcttggattctgccaaatggccagccctcctgtcttctccccgtaccttgtagttagaccgaggtgagaatcctgctgaccccagtcccatcccctctcatttcaggaaaacccttttgtgattcaggtagggggagaggaggagttaagggctccgtttactcccaagtcatggatttttaatattccatttttatcactaatatacctctcttcctagaagctactggagtattgagtgttgtgggaaaaggctaactgtgaattaagttaatgtttttcttataagaaatggaagtttatttttttattgatattactatgtgatgaactgagtatgcatatactgaaatggaaggaaattttaaaactattattctagaagaaatgggcagttttgtaatttggtggtggctgagaccccatagaagttttactatgtaaataatttggagagtgaataaggagattgtgctatgaaatcctgacagcgctctttaggaggcagacttgacagtcctaggaaggttgacataaaaataccaaccttcagtaaagctctagtacaaaaaagggtaaatgtcatcattcttatttttaggcctctttcttgagagaggtgggagtgggaggtagtgttataactggcactttaatttgtttttggaactagaatttaggggcagttggatgaaattgcaaatttagaaggggaataagaattttctagtgctatataaagaaatgatgatggagacaaaagccttgctttcctctttttagaatttattttcgatttttagcatactgtggggcttttagagctaatatgatctaaattcagaaaatttaattttcatagtaggccaggtgtgaattacttatgtttgctatagaatgcttatttagactaacaataaatttactttgctttctaaggccagtcagcgaatgtggggatgaggcaggatgttttaaatgagccagagatgatccacaaagtgaacagtcgacacagaggtctttgagttggatggttgcaaatatattgacattagagtgaaaactccttcctttgggtaaactaaagaaagataaagtatactaaaaaattttaagatggtgttatacaaaaaaaagtttgggtctaacgtgtccacaaagactgtcaagtgaagaatggtggagattcttggtgtttgagcagccaacctggatgagtgacttcagggacagagcagaggaaagcaaaatgaatttcctttatttacccaaaacttgttgactgaatttttgtataggtccgggaaaataagcctaaacaaatagttgtagccttagaaaaactgttttcccatttctttctgagttagaatcagcatagcctccctgtcgccttaaatgtaaaaatcctattttgattaataccccagcctaagagttatagcaatacgagagactgaatctatttttgtttcgggtctttacctcatagtatgaaattagtaagacactgcatagattttgccctgaatactggtgtgcccaggtatgccgtgctctctctctgtttccagtggtggtaattttaaggcctaaagaaagctggggttaatcctgaagctaaaagtaaatgtttcttgaattgattttgttctgtggtacaaataacatctatgaatatcatatctgtatatatctgaaccaagttgtgtgcagagaggttgatataactatatttacagaaaatgatttttacaattaaagttcacattttaacatgaa

SEQ ID NO: 7230 - DNA, 342 bp, Homo Sapiens
  XM_001130106
atgcataaaattttccatcccaacactgacgacgcgtcaggaactgtgtgtctagatgtaattaatcaaacttggacagctctctatgatcttaccaatatatttgagtccttcctgccccagttgttggcctatcctaaccccatagatcctctcaatggtgaagatgcagccatgtacctccaaagaccagaagaatacaagcagaaaattaaagagtacatccagaaatacaccacggagcaggcgctgaaagagcaggaagagggtaccagggacagctcatcggagagctctatatctgacttttccaaagatgaggcccaggatatggagttgtag

SEQ ID NO: 7231 - DNA, 865 bp, Homo Sapiens
  XM_001130122
atgcagccgccggtgcccgggcccctgggcctgctggaccccgcagaagggctttcgaggaggaagaagacgtcgctctggtttgtggggtctctgctgctggtgtccgtcctcatagtcaccgtcgggctggctgccaccaccaggacggagaatgtgaccgttgggggctactacccagggatcattctcggctttggatctttcttaggaattattggcatcaacttggtggagaatagaaggcaaatgactaagaggagaggtaaagacataaaaccaggagggagcccccggttcacatggcagcaatgcagagtgaaatccagacactgcctgtccatgatgttcgtggctccctgcagccgcttcccagttgcgccctcctctgccctggcttcgtctgaggacctgcagcccccttctccaagcagctctggctctgggcttcccggccaggctccaccgtgctacgcacccacctactttcccccgggggagaagccacccccctacgcaccctgatagaggcgtggagtaaaagataacttgtttgtttttttttttaaaaaaaaggcagcctctagaaatcccgcttctgtggccaacctcctagagaacccgggagaatgttccagaagtctgtcccctcctttcctccctgggcacactggtgagggaggctggaaccaggcagggagtggggccctccagacccaggctggtgacaccttggcttgggctctgctcacaccaaatggcgctgaaagttcccacccggcctcctcctctgagagcaattgttctggtgttttcacatcccttaattaattagctattattatgattttgcaaagacagtgca

SEQ ID NO: 7232 - DNA, 1336 bp, Homo Sapiens
  XM_001130192
atgaaggccttgctgtgtctccactctggtttaggtgaatttcgaattcgtgacctgaatgatgaaattaacaagctgctaagggagaaaggacactgggaggtccggataaaggagctgggaggtcctgattatggaaaagttggccctaaaatgctggatcatgaaggaaaagaagtcccaggaaaccgaggttacaagtactttggagcagcaaaagatttgcctggtgttagagagctgtttgaaaaagaacctcttcctcctcccagaaagacacgtgctgagctcatgaaggcaatcgattttgagtactatggttacctagatgaagatgatggtgttattgtgcctttggaacaggaatatgaaaagaaactcagagccgagttagtggaaaagtggaaagcagagagagaggctcggctggcaagaggagaaaaggaagaggaggaggaagaggaggaagagatcaacatctatgcagtcaccgaggaggagtcggacgaggaaggcagccaggagaaaggaggggacgacagccagcagaagttcattgctcacgtccctgttccctcgcagcaagagattgaggaggcactggtgcgaaggaagaaaatggaactcctccagaagtatgcaagcgagaccctgcaggcccaaagtgaagaagccagaaggctcctggggtattaggacccagctggggctctccttggagttcttccatcccccagtggtacctcaggacccagggctgcagacacaggctggtgctgcaagggctcctgccccattctcagccttccttccctctccttgtctcatgttgaccggagggtaggggtctgtccctggtcttcctggtaggttttgtacacatattttgctactgtgtggatccatttatttttattgtggagtgtatacaacaggttgcgaactggctgcctgtgtcttattttgacttgcactgccattttgaggggagaagaatcaattagtggcaaacatttaaaaatgcaattttttgcagaccaaagtataattttaaaaaatgcaaattttctaaaagacacatctcttgaaaaatgagatgatgtggccaggcgcagtggctcacgcctgtaaccccagcactttgggaggccgaggcgggcgggtcacgaggtcaagagatggagaccatcctggccaacatggtgaaaccccatgtctactaaaaatacaaaaaaattagctgggcgtactggcatgcacctgtagtcccagctgcttgggaggctgaggcaggagaatcacttgaacccgagaggtggaggttgaagtgagccaa

SEQ ID NO: 7233 - DNA, 2857 bp, Homo Sapiens
  XM_001130364
cagaactttctccagtcagcctctacagaccaagctcatgactcacaatggcctatttaggcccataccctacctcacggcagtctccgcagatgagcctactgcctcacaacagcctccacaggcacagctccatcgttacaatggcctctttagacccagctcctgcctcccagccttctctccaggccctgaactttctcaagtcgacctcaccaggcccagctcctgcatcttggtggcccctccaggcccagcctctgcctcccgtcggcctctacagtcccaacatctgcctcacagcagattcttcaggcccagcatctgcctcactgtggaccccccaagccaagctcccaacctttcagcagcttctacacacccagctcctgccacccagtggcctctctaggccaagctcatgcttcacaagggcctttgcaggcccaacttttgtctcatggcaaccttccctggccagattcctgcttgtctcccagcagcctagacaggcccaggtcttgcctcacactggcctctctacatccagctcatgcctcacgttggcctctccaggcccaactcctgtcccaggacgtcatctccgggcccaaaacttactcaagtcagactctctggtcccaactgctgccttctggtggcctatgaaggcccaaaatctcctcaagttgacctctccaggcccagctcctgcctcctgtcagcatctacaggcccaacctctgcctcatggggtcttctccaggcccacctcttcctcttggctgggtctacaggcacaactgctgcctcacaacagccttttttggcccagttcctgtccagctcatggcggccaatgtaggcccaaaacttcctcaagtcaaactctccaggcccaccttctgcttcccggtggcatgaacaggcccagctttgacttgagaacagcctctgcaggccctgctcttgcctcccaggggctttttccaggcccagctcttgcctcatggcagctgcccgaggccaaatttctgcttgcctgccagcagcctcaacaggcacagctcctccctcacagtggcccatttagtcccaactcatgactgtcgggccatttccaggcctagtgcctgcctcgtggctgactcttgaagcccaaaacttcctcaaatcagccttttgcccaacttctgtctactgtcggactctacaggccagcctctgcctcacagtggaccctccagacccagatggtgtctcactgtggcatcctcaggtgaagctcctgcctttctgcagcctctacaggcccagctcctgccttgcagtggcctctttaggccaagctcatgccccatggcgacttttccaggcacagcttttgccttttgcagcctgtccaggcccagaatgtccttaactcagcatctccaggacgagctcatcctcccagtgcgtctacaggcccgtctcctgcctcacaacctcctttggcccaactcctgctgagcagctggcagcctctctaggccacagacttcttaaggtaaagcttttcaggcccacctttggcctcccggcagcctcagcaatcaaactattccctcactgcggccaccgaaagccaagtttctccctgcctcacggcatcctccgaaaactgagcatttgcctcacggtggcctccccaggccacgaatctgcctgcctcccaggcagctgctgcctcacaatggtctctttaggcccagttcatgctaaaagatggactctccaggcacagctcttgcctcctggcagcctctgcaggcccaaattctccaaaagatggcctctcctaactcagctcctgcctcatgtcggcctacacaggcccagactcttaccacacagtagaccctccaggcccaccacttgcctgatcatagcctcctaaggccaagctcctgcctttcggcagcctctacaggccaagctcctgcctcgcaattgcctttgtaggccaagatcatgccgtgaagtggcctttcctagcctaacttttgctttttgatgcatactccagtcccaaaacttcctccagtcagccggtccaggccaagctcttcctcccaaaggcttctgcaggccaaaatcgtcgtgaagtcaccctctgcaggcctagctcctgcgtccgagtgctgtgtaggccaagctaatgcctcacagcacacttttgaggctgagcgtttccttttgtgcatcctctccaagccctgaacttactccagttggcctctccagaccaagctctccctcccagtggcctctacaggccaaaattgtcctcaggtcagcctctccagggccaactcctagctaccggtggcttctgcggccaaaatcgacctcaagtcagcctcttcacacccagctcttgcctctgagtggcctctccaggagcaaaactttctcaagtcggcctctccatgcccagcctcctgcttcccgagggcatgtacaggcccagcctctgcctcacagcagactcttcacacccagctcttccctgtctgcggcctctccagtccaaagctgctcctgccttttggcagcttgtacaggtccagctcctccctcacggtgacctctttcggcccaactcatgcctcttgcaacgtgccgaagtgtcagctcctgcctcacactggcctgttgaggcccagctcatgcctctcgtggcctcaacgggcccatcccctccctgttggcggcctctacaggcccggcctctacctcacagtgggctctccaggcccacctcttcctcaccctggcctcctggggcaatgctcctccctctcgggagcctctg

SEQ ID NO: 7234 - DNA, 2146 bp, Homo Sapiens
  XM_001130627
atgggatgcctcagcggcgagctgaggactgagctagtggaggaggtgaaatcagaaggcttcttgccgtcctgtctgacgctgagagcggcagcctgcgtccaacagcgtccgaccgcagcctgcgggggctctcgggccagcggaccccgtctccaccgcggcgctcctcgccgggccgaggccgttcgccccgcagaggcccctccccggcctgctcagaagactccacgctcgcttgccctgattctctccgccctgcacttttgccagctgaaggtccagaacatgcgtgggcgctatgaggcaagccaggacctgctgggcaccctgcggaagcagcttagcgacagcgagagtgagcggcgggccctagaggaacacctgcgtggcgccgtcggtcttgtcccggagaagagcaacctggtccacagcctgcaggtggcccagcagcaggccgaggagctgccgcaggagcgggagaagctgcaggttgcccaggaggagctgcagcgccagcgggaccggctggaggaagagcaggaagaggcggtgcagaatggcgcacgggttcgccgggagcttgagcgcagccatagacaactagagcagctggaagggaagcgctcagtcctggccaaggagctggtggaggtgagggaggcgctgagccgcgccacgctgcaacgggacatgctgcaggccgagaagaccgaggtggccgaggcgctgaccaagggtgaggctggccgcatggagctcgagctctccgtgaccaagctgagggcagaggaggcctccctgcaggactccctgtccaagctgagcgccctcaacgagagccttgctcaggacaagttggatctgaactgccttgtcacccagctggaggaagaaaaggccatgctgcagggccggcagcggcaggcggagcaggaggccacagtggcgccggcagagcaggagtggctggaggagctgtggttggagcaggaggtggcacggcagggcctggagggctccctatgagtggcggagcaggcccaggaggcgctggagcaacagctccccacactgcaccatgagctcagttggctgcaggagcagctagcacaggaggcagcatggcgggagctggaggccgagcgggcccagctgcagagtcagctgcagcgtgagcaggaggagctgctggcccggcggaaggctgagaaggaacagctgagtgaggagattgctgccctgcagcaggagcatgacgagggcctcctcctggccgagagcgagaagcagcaggccttgtctctgaaggagtctgagaagatggcgctgtcagagaagttgatgggtacacggcacagcctggccaccatctccctggagatggagcggcagaaaccagatgcccagagccggcaggagcaggaccgggtaggcctgccgtcgtagggaggcttgcggagcaggagcgccctctctccaccgagctatcccgcggtttccagcatcccatctggcggactcctcttcctctctcttctcctactctgggtcttctatcctggtgttccttgaatgcctatcttccttttgtgcctcggaacctctcacgcctgccacaagttactcttttccttggtagttctgaactttaaataaggtaatgcctgtaagaatgccataaatgctcaataattgtcatctgttattattttcatcagtaacatcatctgaatcatcagtattgtctgcttttaacagctgcatttttcattgtccaaatatagtcacatacatttgaccattttataattattgaataataaatttgttctgctattttacaatgaaaaataatgctgcagagagcatttttgcacatgtatcgtggcagatgtaggccagaggctcttcttttatccatcctatggccaacctatgaatgtatacacgtttaatgagattttgccagcaatcaaagccttcagggaaaatgtccctagctctttactacatcagatcaaggactctggataattggcataacatcctggaatagctgaaacagagatattattctctgctctcctctgttgtctttgtcttttcacgtcttaataaaagtgctggtgacaagagtgtaact

SEQ ID NO: 7235 - DNA, 1119 bp, Homo Sapiens
  XM_001130755
atggtgaagctctctattgtcctgaccccacagttcctgtcccatgaccagggccagctcaccaaggagctgcagcagcacataaagtcagtgacatgcccatgcgagtacctgaggaaggttatcaatactctggctgaccatcatcattgtgggactggctttcgtggaagtccttggttacatttcattattgcgtttccgagaagttataaagttttcattatcctctggacagtttacctttggatgtctctcctgaagactatcttgtggtctcgaaatggacatgatggatccacggatgtacagcagagagcctggaggtccaaccgctgtagacagaaaggaaataaaattggcctgaaagacgtcattactctatggagacatgtggaaacaaaagttagagctaaaatccgtaagaggaaggtgacaacgaaaatcaaccatcatgacaaaatcaatggaaagaggaagaccgccaaaaaccatatcaggaaactaagcatgaaagaatgtgagcatgcagaaaaggagaggcaggtatcagaggcagaggaaaatgggaaattggatatgaaagaaatacacacctacaagaaaatgtttcaacgtgtgcaagagttgtggcggcgggcagaggactaccacaaacgcaaaatccccccttctgcaagaaagcctctttgcaactgggtcagaatggtggcagcggagcatcgtcattcttcaggattgccctactggccctacctcacagctgaaactttaaaaaacaggatgggccgccagccacctcctccaactcaacaacattctataactgataactccctgagcctcaagacacctcccgaatgtctccttcgtccccttccaccctcagtggatgataatatcaaggagtgtcctcttgctcctcttccaccctctcctcttccaccctcagtggatgataatctcaaggagtgtctccttgcccctcttccaccctctcctcttccaccctcagtggatgataatctcaagactcctcccttagctactcaggaggccgagggcaggtttataatgaaatcctcctcagaggccaggtgcagtgacacccatctgtaa

SEQ ID NO: 7236 - DNA, 6551 bp, Homo Sapiens
  XM_001130790
atgcagaccctgggcagcttctttgggtccctgcctggcttcagctctgcccggaacctggtggccaacgcacatagctcggcgagagcccggccggccgctgaccccacaggagcgcctgctgccgaggctgcccaaccacaggctcaggtggctgcccacccagagcagacggccccatggacggagaaggagctgcaaccttcggaaaagcagatggtgtccggggccaaagacctggtgtgttccaagatgtccagggccaaggatgccgtgtcctccggggtggccagcgtggtggacgtggctaagggagtggtccagggaggcctggacaccactcggtctgcacttacgggcaccaaggaggcggtgtccagcggggtcacaggggccatggacatggctaagggggccgtccaagggggtctggacacctcgaagactgtgctgaccggcaccaaagacacagtgactactggggtcatgggggcagtgaacttggccaaagggactgtccagactggcgtggaaacctccaaggctgtgctgaccggcaccaaagatgctgtgtccactgggctcacaggggcagtgaatgtggccagaggaagcattcagaccggtgtggacaccagtaagactgtcctaacaggtaccaaggacaccgtctgtagtggggtgaccagtgccatgaatgtggccaaaggaaccatccagaccggcgtggacaccagtaagactgtcctaacaggtaccaaggacaccgtctgtagtggggtgactggtgccatgaatgtggccaaaggaaccatccagaccggcgtggacaccagtaagactgtcctaacaggtaccaaggacaccgtctgtagtggggtgactggtgccatgaatgtggccaaaggaaccatccagaccggcgtggacaccaccaagactgtcctaactggcaccaagaacactgtctgcagtggggtgaccggtgccgtgaacttggccaaagaggccatccaggggggcctggataccaccaagtctatggtcatgggtacaaaggacaccgtctgcagtggggtgactggtgccatgaatttggccagaggaaccatccagacaggcgtggacaccaccaagatcgttctaactggtaccaaggacactgtctgcagtggggtcaccggtgctgcgaatgtggccaaaggggccgtccagggcggcctggacactacaaagtctgtcctgactggcactaaagatgctgtgtccactgggctcacaggggctgtgaacgtggccaaagggaccgtccagaccggcgtagacaccaccaagactgtcctaaccggcaccaaggacaccgtctgcagtggggtgaccagtgctgtgaacgtggccaaaggggccgtccaggggggcctggacaccaccaagtctgtggtcataggtacaaaagacacgatgtccactgggctcacgggggcagcgaatgtggccaagggggctgtccagacaggtgtagacacagccaagaccgtgctgaccggcaccaaggacacagtgactactgggctcgtgggggcagtgaatgtcgccaaagggaccgtccagacaggcatggacaccaccaaaactgtcctaaccggtaccaaggacaccatctacagtggggtcaccagtgccgtgaacgtggccaagggggctgtgcaaactgggctgaaaacgacccaaaatatcgcgacaggtacaaagaacacctttggcagtggggtgaccggtgctgtgaatgtggccaaaggggctgcccagacaggtgtagacacggccaagaccgtgctgaccggcaccaaggacacagtcactactgggctcatgggggcagtgaatgtcgccaaagggactgtccagaccagtgtggacaccaccaagactgtcctaactggtaccaaggacaccgtctgcagtggggtgaccggtgctgcgaatgtggccaagggggccgtccagacgggtgtagacacggccaagaccgtgctgaccggtaccaaggacactgtctgcagtggggtcaccggtgctgtgaacgtggccaagggggccgtccaggggggcctggacactacaaagtctgtcctgactggcactaaagatgctgtgtccactgggctcacaggggctgtgaacttggccaaagggactgtccagaccggcatggacaccaccaagactgtgttaactggtaccaaggatgctgtgtgcagtggggtgaccggtgctgcgaatgtggccaagggggccgtccagacgggtgtagacacggccaagaccgtgctgaccggcaccaaggacacagtcactactgggctcatgggggcagtgaatgtcgccaaagggaccgtccagaccagtgtggacaccaccaagactgtcctaactggtaccaaggacaccgtctgcagtggggtgaccggtgctgcgaatgtggccaaaggggccatccaagggggcctggacactacaaagtctgtcctgactggcactaaagatgctgtgtccactgggctcacaggggctgtgaagttggccaaagggactgtccagaccggcatggacaccaccaagactgtgttaactggtaccaaggatgctgtgtgcagtggggtgaccggtgctgcgaatgtggccaagggggccgtccagatgggtgtagacacggccaagaccgtgctgaccggtaccaaggacactgtctgcagtggggtcaccggtgctgcgaacgtggccaagggggccgtccaggggggcctggacactacaaagtctgtcctgactggcactaaagatgccgtgtccactgggctcacaggggctgtgaacttggccaaagggactgtccagaccggcgtggacaccagcaagactgtcctgaccggtaccaaggacaccgtctgcagtggagtcactggtgccgtaaatgtggccaaagggaccgtccagacaggtgtggacacagccaagacggtgctgagtggcgctaaggatgcagtgactactggagtcacgggggcagtgaatgtggccaaaggaaccgtgcagaccggcgtggacgcctccaaggctgtgcttatgggtaccaaggacactgtcttcagtggggttaccggtgccatgagcatggccaaaggggccgtccaggggggcctggacaccaccaagacagtgctgaccggaaccaaagacgcagtgtccgctgggctcatggggtcagggaacgtggcgacaggggccacccacactggcctcagcaccttccagaactggttacctagtacccccgccacctcctggggtggactcaccagttccaggaccacagacaatggtggggagcagactgccctgagcccccaagaggccccgttctctggcatctccacgcccccggatgtgctcagtgtaggcccggagcctgcctgggaagccgcagccactaccaagggccttgcgactgacgtggcgacgttcacccaaggggccgccccaggcagggaggacacggggcttttgaccaccacacacggccccgaagaagccccacgcttggcaatgctgcagaatgagttggaggggctgggggacatcttccaccccatgaatgcggaggagcaagctcagctggctgcctcccagcccgggccaaaggtgctgtcggcggaacaggggagctacttcgttcgtttaggtgacctgggtcccagcttccgccagcgggcatttgaacacgcggtgagccacctgcagcacggccagttccaagccagggacactctggcccagctccaggactgcttcaggctgattgaaaaggcccagcaggctccagaagggcagccacgtctggaccagggctcaggtgccagtgcggaggacgctgctgtccaggaggagcgggatgccggggttctgtccagggtctgcggccttctccggcagctgcacacggcctacagtggcctggtctccagcctccagggcctgcccgccgagctccagcagccagtggggcgggcgcggcacagcctctgtgagctctatggcatcgtggcctcagctggctctgtagaggagctgcccgcagagcggctggtgcagagccgcgagggtgtgcaccaggcttggcaggggttagagcagctgctggagggcctacagcacaatcccccgctcagctggctggtagggcccttcgccttgcccgctggcgggcagtagctgtaggagcctgcaggcccggcgcggggtcgccctgctctgtccagggaggagctgcctcagaactttctccccgcccccaaacctggatcggttccctaaagccctagacctttggggctgcagctggctgagcgccgaggggctgcggaggcagtgaccttcttaactgagccaccccacgccctgctccgggcctgcctgcatctcccacctcctccccagcgctgcctgcccctctcggagcctggggtcactcagaccaccagccaagagccttcccttgaagtccccaagcaagcactgcaattaggaaagagaaaaagcagcgtgcccagcctggaagggcatctgtttgccccgctagcaacccttttatatctagcagggctcttccagtcctgcagcacgggcccccagctatcagcggtgcaggcagtgctgtggcatcccaggctccgggcagctccgttctcatgctgaaagtgggtctccggccttagcacacacaccttgagggtcttaagaaccacattccctcatagtagaaagtactagaaaaagcgacactgccatcatcatcccaaggcaggctgctactgcctttgctgacccccggggtggcctcacggtggggacaaagctgccaggagccacagcagccacagctggggctttgcaccagcctggcttgagactgagcagtttgcagggggtggggggtgcaaaaaacaagcaaacaggctgctgctgcctccagctgcccaccacaggcctgccccaggcacctggggctctgaggcccctggggaggctgggcccagcagctgcccctggagaacacagacaaaggacttccccgcagggaactgtgccctatggagggatcagacagggctgggaacagccacagaggctgcgtgcctatggcacagcccttcctccgccgcacactccccctgggtcctcaggcccacccaagcgccgggctgcagaggaagcggggctggggaggctgcaggcatcagagacactggtggtggcggacccggccgccgggccccgtgctctcaggctagcccaggtcgtggaggctggcaggctcaggtcgggtgtgagacgtgccgtggctgcgctcagtccagcggggaggagccgttcagcccggcctccccaggaagccatatccccactcacccggtaagagaaccttgtcgtcccctttccatgctctcctaggacacgagcccaggaaccccagacccagggggaggaagggtggaggggccccaggggtcaccgtgtgcaccaggggccgtgaggggccggggcattcagctcagctctgaaccggggaagctggcacggcaaggactgcctcaggtgacgggccgtgagaggggacgggtcaggagccttcccaagccttctcctcagcccgacacccatggccatcggaggctaggatgccagacacagccatttgcagaaatcaggcacagtgactgcagctcacgtccagccaaccaagcatggggccgcagctcaggaagtcccttcccgccacaccacagcctaattcttactgggacggaggcaactcggctacgctgggcaggacgacaaacacgagacgccactgtggaatgagcaacttcggagcacggggtgacttgcttgggaccgtgcccacgtgacagccccttatgcagaggaggaaagagaagccccgagtgggaggggaacctgtccaaagtcacacggtgtgtgggtgacacagctggggtgagtcgaggctggcccctgaggcccatgctccctgaacgctggagaccactgtcggctagcagcggctctcagggaaggcctggtctccaccctcccagcctagcctcgcggaccctcgtcctccccacatcggacctgctcacctgcctggaccctgggctgccagatgcaggaagcatcaaaccccccagcctcgtgggtgcggggcagggcgcaggcagcacagcttagatgccctggtttgtccctcttgtctcctgggaagagcttgctcccgcccagctctcctgccactggcctttcagggttgggctgggcccagagtgccttttagtcgcttctcacggtggcctgatggctcaacccagtcccaaacgggcccagtgacactgccgactgcgccccagctcaggcccccactgcaccagcaatgctagaaaaccaagccaataaaagtgatttcttttttcattaaaaaaccatttatagtc

SEQ ID NO: 7237 - DNA, 4324 bp, Homo Sapiens
  XM_001130826
gaagaattatatggtttggctctgtccgcacccaaatctcatcttgaattgtaacaattcccatgtgtcaagggtggggccaggtggagataactgaatcatggaggcagtttcccccatgctgttctcatggtagtgaataagtctcatgaggtctgatggttttataaatggatgttcccctgcacatgctctctcctgcccaccatgtctgactaaattttgtatttttactagagacgggctttcactatgttggccaggctggcctccaactcctgatctcgtgatccgtccaccccgacctcccaaagtgctaggatcataggcataagccaccacacccggcctcttttttttctttttcttttttttatctggagactgagttttgcactcgttgcccaggctggagtgcaatggtgcgatctcagctcactgcagtctccacctcagcaggagagcaggaatcttcagtgatccacgggcaaatatgcagccattgtgggcacctgttcctcccgcgacctttgtgcccacgtctctccctccagtacctactgcacgaccccccacgtccgcctcctgccattgccagcaggtgccttgcgcgggtacctggctgcgcttattcatccattatggtcgctctgtcactggtgccattatgtgctcacatgcccactccctcaggtttagaagtcgcgttgcccggcaacagaacaatctgctggcttagcctttggccaagttggcagctggacgaggacgctcagagcccagctcttgagagttcaagtatccgacagttccccactgctcccaggagcggttacccgggcactctgtgcccctcattcctgtttgggccaaggccgaggacctgcgagtagggctcagttgcctggagccccttcagcccatcccccagttcactttgcttgtgggatctccccgttgctcctgcccctggactgagtggcaggccatcctacaaacacccggacactcgacatcactggtgtcaagacaactctaagaaggtttcaagtgatcctgcaagacctgtgttccatcctggtgattctgtcttcaatttcactgcacaggtaccacagtaagccagtgctgtgtgctccgagttccagggcatcccccagctcagccactacactgagcacaaggactctgtggggcccaggagcaggtagtcacccctttggggtccacaacacccggctgtccccagacttgtgtccagggaagatagtgttgagggccctcaaggagagcggggcagggatgcctgagcaggacaaggaccccagagtccaagaaaatcctgatgatcagagaacggtccccgaggtcaccggggatgcacggtctgcattttggcccctgcgggacaatggaggcccctctccctttgtgcccaggcccgggcctctgcagacagacctccatgcccagagctcagaaatcagatataaccacacatcccagacatcctggacgagctcgagcaccaaacgaaatgccatctccagctcctacagctccacgggaggcttgccggggctaaagcagaggagggggccagcctcatcccgctgccagctgaccctcagttactcaaagacagtgagtgaggacaggcctcaggctgtctcttcgggtcacacacggtgtgaaaagggggcagatacagcaccagggcagacaatcgccccaacgggtggctcccccagatcccaggactctaggccccgtagacgcaagattcccctgctgccacgcaggcgaggggagcctttgatgctgccacctcccttagagctggggtaccgggtcacggctgaagacctgcacctggaaaaagagacggcattccagcgcatcaacagtgcactgcacgttgaggacaaggccatcccggactgcagaccctcacggccttcccacactttgtcctcacttgcaacaggggcttcgggtgggcctcccgtttctaaagcacccactatggatgcacagcaggacagacccaagtcccaagactgcctgggcctactggcccccctagcatctgctgcagaggtctcctctacagctcccgtgtctgggaagaagcacagaccaccaggacccctgttctcctcctcagatccccttcctgccacctcttcccactccggggactcagcccaggacacctcgctgattcctgcccccttcacacctgcaagcagggatgccggcatcagaagaatgtttcgtgttcgaaattgtttgaggggtttgggtttatttttgttggttttttcttttttttttttgcttacgtgggcatccttcagcttttaataatctgaaaaattctatttacccattgtcaatgtgtataaattaatctcagtcaattttatacaataaaaggtgaacttttatccatcaaacaataatttaacaaaaaatgtaccggaagaagaatgttcattacaaatataggaaacataaatattaccaaatattggcaagcactaaaatgttcagaaatataagtctattacagttatagctctctcaagcaaaaaaacagcagagaaaaacttagttttcctgaggggctatttatttacttagggatttgttaaaaggtcaaatggggtcacacagaatactaagaagagctgttcacccaggcctcactaagaactcttcttcatgcagtagctatatagtaatatgacaactgctcctacgacccaaagaggaactacagcaactactctttagcatctgttgctcccaactctgctttgcaattatatgactcaagcattctggctccgttaactattactgctgttactcccaagtaaattccctctaaaaaataaaaatttttaaagctgtaatttaagctctctgctgcctcatgacttcaattccatcagagttacgcattgtttcctctgtacatctttgctctgcttccattgctaattccctagtaaagtgttgtatattcaaagttccaaagaaacagaatatccaagacatcaccaatcatccaaaacacagtgtaggaggccacagttaagagaagcaagaccattagctctttttataggctcgagaacaacaggatgctttggtcctgtatcagcaggacgctttttgggtagatcctactgccaccctactatcgggtagatcctactgtcaccctagctatgggcacatgtcagagtcccatgtaataaaggagacaaaaggaaaccaccacgagtataaactaagaaaagtactccaaggtttctaagaatggagctgtataactcactttgccccgtttgttacttctccacggtacttaccaccacctattacatatattttgtttatagtcagtcttcccccattagaatgaaagttccgtgaggataggactatacagtcagccctcagtatccatgggggactggtttcaggatctcctgagggtaacaaaggatactcaagtccctgatataaaatgacatagtatttgcacatcacctttgcacatcctcccatatacttcatatcaactctagatcactcataatatccgatgtaaatgtcatgcaaatagttattgtactatattgtgtaaggaataaggacaagaaaaaagtctgtacatgttcagtacagacgcaatttttttttccaatatttccaatccttggttgccttaacggatgtagaacccaggaataagttctggtgtcctattgcatagtaggatgagtatagttaacaataacatattatatatttgaaaatagccagaagagtagattttgaattttctccctacagaaaaatcattatgcaaattaccctgatttgatcattacacattgagtacatgtattaaaacatcacattctaccccatatatatgtacagttattatgtgtccataaaaatttaatgtcaatgtgtgaaataaaatgaaaaaataaaaatttttaaagctgtaattatctccatctggtaggaatatatacaatctgaaataaaaaatatatttgtaattgttaggacaaaatagattatacattaagtctgcaaattataaattataaaattctcacagaacctgaaaaattattgatactgttaaatatttaaaaagctgtccttggagagaaagaaacctatcagatttacatcaacaagtgtaatatgtcagcctattaccatctgctacagactgcatgtttgtgttccctcaaaattcatatgataggcccggcgcggtggctcatgc

SEQ ID NO: 7238 - DNA, 5217 bp, Homo Sapiens
  XM_001130839
atgcattcttctagcatctttaacacctataaagagcgagtcagaagaacaagtagaggtgtgattgcctatatcagttcttccagctcagcctcaagccctgcctcttgtcacagtgagggttctgagaatagtttccagtcctcctcctcttctgttccatcttctccaaatagctctaattctgataccaatggtaatcccaagaatggtgatctcgccaatattgaaggcatcttgaagaatgatcgaatagattgttctatgaaaacaagcaaatcgagtgcacctgggatgacaaaaagtcatagtggtgtgacaaaatttagtggcatggttctactgtgtaaagtctgtggggatgtggcgtcaggattccactatggagttcatgcttgcgaaggctgtaagggtttctttcggagaagtattcaacaaaacatccagtacaagaagtgcctgaagaatgaaaactgttctataatgagaatgaataggaacagatgtcagcaatgtcgcttcaaaaagtgtctgtctgttggaatgtcaagagatgctgttcggtttggtcgtattcctaagcgtgaaaaacagaggatgctaattgaaatgcaaagtgcaatgaagaccatgatgaacagccagttcagtggtcacttgcaaaatgacacattagtagaacatcatgaacagacagccttgccagcccaggaacagctgcgacccaagccccaactggagcaagaaaacatcaaaagctcttctcctccatcttctgattttgcaaaggaagaagtgattggcatggtgaccagagctcacaaggatacctttatgtataatcaagagcagcaagaaaactcagctgagagcatgcagccccagagaggagaacggattcccaagaacatggagcaatataatttaaatcatgatcattgcggcaatgggcttagcagccattttccctgtagtgagagccagcagcatctcaatggacagttcaaagggaggaatataatgcattacccaaatggtcatgccatttgtattgcaaatggacattgtatgaacttctccaatgcttatactcaaagagtatgtgatagagttccgatagatggattttctcagaatgagaacaagaatagttacctgtgcaacactggaggaagaatgcatctggtttgtccaatgagtaagtctccatatgtggatcctcataaatcaggacatgaaatctgggaagaattttcgatgagcttcactccagcagtgaaagaagtggtggaatttgcaaagcgtattcctgggttcagagatctctctcagcatgaccaggtcaaccttttaaaggctgggacttttgaggttttaatggtacggttcgcatcattatttgatgcaaaggaacgtactgtcacctttttaagtggaaagaaatatagtgtggatgatttacactcaatgggagcaggggatctgctaaactctatgtttgaatttagtgagaagctaaatgccctccaacttagtgatgaagagatgagtttgtttacagctgttgtcctggtatctgcagatcgatctggaatagaaaacgtcaactctgtggaggctttgcaggaaactctcattcgtgcactaaggaccttaataatgaaaaaccatccaaatgaggcctctatttttacaaaactgcttctaaagttgccagatcttcgatctttaaacaacatgcactctgaggagctcttggcctttaaagttcacccttaaggcctttgtttatttaaacatgaactgatggtaactgtacattttgtgctaaaatgcatatttatatgtgtataccatatgtggagatagaaaagacctttaagacaataaaagattgtaggctatctctgtaatcatgcaatagctgttcggattgagaactcttcagccatgattagacgttgactgcatctccctgatagaccaatcagctgtgtcgcacttaaactggagaagttacactgaagtataatcacactgaatgttagactttttcatctgccaaaaccaaaaaccattttgatctccctgtggttatcaatataacgcacaatcacaagtgtatgaggacttagaaattaatcctttgtggtaggagttctgttgaatgatggaaatcttattactaccacaagcctatttgatctggtaattggagacttcgggatttaggagatctccatgtctgtatttactctaccactgctaaagtgtgtggtcctgggtagtttacttgcttgcggaaaatgagaattgatggtgtccccaatgccccacctcacagagttactaaaaaatgtctgtaaagcatatttacctcttgggagataggcactatgtaaataaggtaaaatttctgttattacaattattcataataatattcttttcttatttctaagcctttctgggaaatcatttcagtccacaccaaccatattattcagggttcctgccatatgtgtggggtatcctactgatacacacgtattcaaagtttatgggtacaacaaagacatagtacatgtacataatatgtatgtgaatatagttaaatatatttcttcacaatattttaaactgtgaagaactttatcatacaggaaacttaaaacaagaggtgtcaaaagacccaaattaggtgcattttacttgtttatgatggcataaccattgctttaaaatgtttagacagtagaatattgaatttatgctctatttttgtttatttaagcaacacttaatgtaaaagtgcaacaggcaattgaatccaaatttcaacgacaaaaaaaaaaacatgtattttagagttcatctttggcaaaatctttggttcagggtactagttgtttaaaagttgattcatattcttaccttgtgctgagaaaggttgcattgctgccccttatacacatgctgcagcttgatgttaaagaatttttattctttctgaagaactaattaatgtttaaagcaactgtttaatatgatggcatgtgtgtgtgtgcgtgcgtgtgtatgttctgagtccacttcttttttcctaaataacactacagggattttgtcatattagatttaatttataatttgaaaaatcatctagtgtgtgacctacaggcttagaaatggtatagtcaaagacattttatccacatttctaatagtggacttgattaagtagataagatcagcatctgtttatggtagtaggagaaatagccaaagttgaggattttatgtatgttttcctgtttacctggaaaatagcaattaattggattttttggtaaagattgccttctgtataatgtttggattatataaaattgcaaaaatgataacagcccgctttactgtactaagcctgttactttcatgacgtgtgagcagaatgccttattttgtaatcttgtttaacttgttgctactgggacttgatttactgtggcactagttaagtaagttaaaaaaaagttaaaccctctcattattaaagaggaaaggcgatggtgatgtctgtagtacaatataaaccataattgtgatttaccttaagtaggtataactcttatgggatatacagtatagtttttgtgaatctttacatgatagcattatctttttataattttttttcctaagataaacaaatgcatagttttcttctatgggtgatagaaacagctttttgaagtaatgaaaacctcaaaagatcatgttgattcttaatttttgccttttgcataagcctctttataacatgtatctttaaaacaattaagtctttaggaatgtgtaaccagaactatgttagtattgcttataaaactttagttaggttcaatatatacatatatacatctctatataggtatatagatttgcattttgtcttgtaaaattttatttgaataaattcttcctgtaggtaatgggaaacaaaattaatagttcatatgtcactcatagcatttctatatttgaaagtagcccaatataaaacttttgattctaaaattaaaccagcagcctattacaagcacattctttgattgagtcattggttataaacttactaaatgcagagaaagcagccaatttaggaaacttctgagttggtgggacactgttgattaataatgtactgtatgaattaagtgatgctttaactttgattttacattttaaagttaaaatgtgggcattatgtcagcaaacttaagggcattatgtcagcaagctaaaacattttttttcctgtgcttttaatgtatctctttacatgatctgagagaggattcaagttgatagaaatagctgaggggaaaagggggaacatcttgggatgaagcttgtccttatggtgatggtttaattacagattaaaaaattagaaggaaatttcagtggattaagtgtatagctttcatatctacatttcaagaaattaccattgtaacttgataagagatgatttattttatgtaaacatctttgcaaagcaaggtgtagcagctcagctagatttattactgtgcacgaaagtaaatacctatctcaattattctttttcttttccaatataaagtttgctgaatgtacaagaagagtttatcacttaggatatagaatttttttaggggttgggggaggggatctgttaggaaactgttacctataaacaaagattgactggattcgatccaaaagataaaacttgaagctattctggaactaacatggaaaaatgaaatggctattgtttaaaaaaatgatagaaatacattgttgatgggatatgagttaagtttattttctacaaactgtaattgatgaggacatggataatatcttcatgtttctgagaagtaatctgtatgtggggggaggggataataaatatttctaaccaactgtggtgtttggtgtctaatctaccttgccttttttgtaaaactaataatttaactcactacaagtatctttcccctgagcatagcaggatgttttatgtaaatctctgattcagcatggggaaatgtgtgtatatgtatatatgtgtgtgtgtatatacacacatatatatgtatatgtgtatatatgtatgtgtatatatatatatgtatatatacatgcacacacacacacagggct

SEQ ID NO: 7239 - DNA, 396 bp, Homo Sapiens
  XM_001131147
atgcccagctccgcgcctcgcggacccagcaagctcgcgctcagacgccccagctccgccgagaggacgctcgccccgggtgcttctttttccccaagtgcaggcagagcccctggagccatggccagcccttccggcagctccgaagccactggcaagccccgaggcagggatggccggcccaggagggaggaggacgacgtccctcctgaagagaagaggctgcggctgttgctggaggggggaagagcacagcccgaggactgcgaggacggggaggacgcgctgcggccgggcaaggaggacaccggcacccagacaggtggcgacggcagaggagtaagtgacgcgggcgcgggggtccgggggcgcggaggtgccggggacgcggggtag

SEQ ID NO: 7240 - DNA, 1138 bp, Homo Sapiens
  XM_001131304
atgcacaaggcgcggctacgaggccactgtgcccgggcagggaagtcggtgcggttggccagctccgggatgacccgccgggacccgctcacaaataaggtggccctggtaacggcctccaccgactggatcggcttcgccgtcgcccagcgtctggcccaagacggggcccacgtggtagtcagccgccggaagcagcagaatgtggaccaggcagtggccacgctgcagggggaggggctgagcatgacgggcactgtgtgccatgtggggaagatgaaggactgggagcggctggtggccacaaatctggacattaatgggaaggccctagccctaatgataaaggcagtggtgccagaaatggagaaacgagggggtggttcagtggggttcctggcctctgtagcagccttcaggccacttcctggcttcagtccttacaatgtcagtaaaacagccttgctgggcctcaacaagaccttggccatagagctggccccaaggaacattagggtgaactgcctagcacctggacttatcaagactagcttcagcaggatgctctggatggacaaggaaaaagaggaaagcatgaaagaaaccctgcggataagaaggttaggcgagccagaggattctcttggcatcgtgtctttcctgtgctctgaagatgccagctacctcactggggaaacagtgatggtgggtggaggaaccccgtcccgcctctgaggacccggagacagcccacaggccagagttgggctctagctcctggtgctgttcctgcattcacccactggcctttcccacctctgctcaccttactgttcacctcatcaaatcagttctgccctgtgaaaagatccagccttccctgccgtcaaggtggtgtcttactcgggattcctgctgttgttgtggccttgggtaaaggcctcccctgagaacacaggacaggcctgctgacaaggctgagtctaccttggcaaagaccaagatattttttgcccaggccactggggaatttgaggggagatgagagagaaggaagctggagtggaaggagcagagttgcaaattaacaacttgcaaatgaggtgcaaataaaatgcagatgattgcgcggctttga

SEQ ID NO: 7241 - DNA, 2683 bp, Homo Sapiens
  XM_001131480
taatggcgccaacccccgtggtgctgaggcgctctgctcaccttccctgctcgcctagtgttccctccaggcatggaggaactgcaggcccagctggagaaggagctggagggaggcacactgttcgaagctgacttctccctgctggatgggatcaaggccaacgtcattctctgtagccagcagcacctggctgcccctctagtcatgctgaaattgcagcctgatgggaaactcttgcccatggtcatccagctccagctgccccgcacaggatccccaccacctccccttttcttgcctacggatcccccaatggcctggcttctggccaaatgctgggtgcgcagctctgacttccagctccatgagctgcagtctcatcttctgaggggacacttgatggctgaggtcattgttgtggccaccatgaggtgcctgccgtcgatacatcctatcttcaagcttataattccccacctgcgatacaccctggaaattaacgtccgggccaggactgggctggtctctgacatgggaattttcgaccagataatgagcactggtgggggaggccacgtgcagctgctcaagcaagctggagccttcctaacctacagctccttctgtccccctgatgacttggccgaccgggggctcctgggagtgaagtcttccttctatgcccaagatgcgctgcggctctgggaaatcatctatcggtatgtggaaggaatcgtgagtctccactataagacagacgtggctgtgaaagacgacccagagctgcagacctggtgtcgagagatcactgaaatcgggctgcaaggggcccaggaccgagggtttcctgtctctttacaggctcgggaccaggtttgccactttgtcaccatgtgtatcttcacctgcaccggccaacacgcctctgtgcacctgggccagctggactggtactcttgggtgcctaatgcaccctgcacgatgcggctgcccccgccaaccaccaaggatgcaacgctggagacagtgatggcgacactgcccaacttccaccaggcttctctccagatgtccatcacttggcagctgggcagacgccagcccgttatggtggctgtgggccagcatgaggaggagtatttttcgggccctgagcctaaggctgtgctgaagaagttcagggaggagctggctgccctggataaggaaattgagatccggaatgcaaagctggacatgccctacgagtacctgcggcccagcgtggtggaaaacagtgtggccatctaagcgtcgccaccctttggttatttcagcccccatcacccaagccacaagctgaccccttcgtggttatagccctgccctcccaagtcccaccctcttcccatgtcccaccctccctagaggggcaccttttcatggtctctgcacccagtgaacacattttactctagaggcatcacctgggaccttactcctctttccttccttcctcctttcctatcttccttcctctctctcttcctctttcttcattcagatctatatggcaaatagccacaattatataaatcatttcaagactagaatagggggatataatacatattactccacaccttttatgaatcaaatatgatttttttgttgttgttaagacagagtctcactttgacacccaggctggagtgcagtggtgccatcaccacggctcactgcagcctcagcgtcctgggctcaaatgatcctcccacctcagcctcctgagtagctgggactacaggctcatgccatcatgcccagctaatatttttttattttcgtggagacggggcctcactatgttgcctaggctggaaataggattttgaacccaaattgagtttaacaataataaaaagttgttttacgctaaagatggaaaagaactaggactgaactattttaaataaaatattggcaaaagaatatagagcatcaaaaaatttttctgggttcatatgcttgatgtggtaaagaattaaaaattttttatttttattgagacagaatcttgctcttgctgcccaggctggagtgcaatggcgcgatcttggctcgctgcaaccttcgcctcccaggttcaaacaattctcctgcctcagccgcccaagtagctgggattacaggcgcctgccaccacgcccaactaatattttgtatttttagtagagatggggtttcgccatgttggccaggctggtttcgaactcctgacctcaggtgatccacccgcctcggcctcccaaagtgctgggattacaggtgtgagccgccctgcccggcctaaaaatttttaaaaattaaaaaaaaattgtcttctaactggataggatttaatttgtgtcctgaaaccagacacactacaaaggaaaccattaacatagtgagtcctaagaatgtttgactttgaagattttcatttcaaggctcaagcagaaaatatgaaacaaaagtcagctggttgaactgaagaagctgctcctggctggagatacgtggccttaggacttcagcctgaggcatccgtgtcttaacccatctgccgttcaccagttggcaagctgcaagttaatataattaactggaagaagactaaacatttcattattatcataatgagtacaacaacggattc

SEQ ID NO: 7242 - DNA, 2248 bp, Homo Sapiens
  XM_001131546
atggcagtcaataaatcgttcactaagcagcccccaaccccaaaacccccaagtccccgggcgccgaggacgctgcgagtcctgcgcatgcgcaaggttgctctctcgctcaccgcctccttggcgaatggcctgttccattctcgagggatgccggcgggaggtgaggcgggagacttggaagcctgggcccggaaggagggccggcgtggcgcccaggtacggaatcccagagggctccgcccaccattacagggccccgccccgccgccccgccgcccctcaaccatcaggttcggcagccggcggcgccgcctggcagctcctcctcttctccgccccgccggccgcgggcgcgggggacgtcagcgctgccagcgtggaaggagctgcggggcgcgggaggaggaagtagagcccgggaccgccaggccaccaccggccgcctcagccatggacgcgtccctggagaagatagcagaccccacgttagctgaaatgggaaaaaacttgaaggaggcagtgaagatgctggaggacagtcagagaagaacagaagaggaaaatggaaagaagctcatatccagagatattccaggcccactccagggcagtggacaagatatggtgagcatcctccagttagttcagaatctgatgcatggagatgaagatgaggagccccagagccccagaatccaaaatattggagaacaaggtcatgtggctgtgttgggacatagtctgggagcttatattttgactctggacgaagagaagctgagaaaacttacaactaggatactttcagataccaccttatggctatgcagaattttcagatatgaaaatgggtgtgcttatttccacgaagaggaaagagaaggacttgcaaagatatgtaggcttgccattcattctcaatatgaagacttcgtagtggatggcttcagtgggttatataacaagaagcctgtcatatatcttagtgctgctgctagacctggcctgggccaatacctttgtaatcagctcggcttgcccttcccctgcttgtgccgtgtaccctgtaacactatgtttggatcccagcatcagatggatgttgccttcctggagaaactgattaaagatgatatagagcgaggaagactgcccctgttgcttgtcgcaaatgcaggaacggcagcagtaggacacacagacaagattgggagattgaaagaactctgtgagcagtatggcatatggcttcatgtggagggtgtgaatctggcaacattggctctgggttatgtctcctcatcagtgctggctgcagccaaatgtgatagcatgacgatgactcctggcccgtggctgggtttgccagctgttcctgcggtgacactgtataaacacgaccctgccttgactttagttgctggtcttatatcaaataagcccacagacaaactccgtgccctgcctctgtggttatctttacaatacttgggacttgatgggtttgtggagaggatcaagcatgcctgtcaactgagtcaatggttgcaggaaagtttgaagaaagtgaattacatcaaaatcttggtggaagatgagctcagctccccagtggtggtgttcagatttttccaagaattaccaggctcagatccggtgtttaaagccgtcccagtgcccaacatgacaccttcagcagtcggccgggagaggcactcgtgtgatgcgctgaatcgctggctgggagaacagctgaagcagctggtgcctgcaagcggcctcacagtcatggatctggaagctgagggcacgtgtttgcggttcagccctttgatgaccgcagcaggtatgatctcgtgaaaccttgagagaaactgaatgaggaatgaaactattgttcctgtttcacacagaagaaaactgaggtgaaaaggggttggcactcatgatgagcccctgttctcattctgcaaatggtgaagctctctatcgtcctgaccccacagttcctgtcccatgaccagggcccgctcaccaaggagctgcagcagcacgtaaagtcagtgacatgcccatgcgagtacctgaggaagacgatcctacacctgccacctccgatggatccactgcctctgtgcctgcctgtactgccgatgctccagtggataactcagcatcccagccaaggcccaatgccactgaagatggacctgccccctggggacccaggagtcctaccactcag

SEQ ID NO: 7243 - DNA, 1902 bp, Homo Sapiens
  XM_001131589
tggaggaggctgctctttggcgtaaattgcaatcgattagggatcgtttctcagaatcaagttagaagtgagagttcagataagtgaggccgccattgctgctttgaacacctcagaaggggagaatggatttatcaggagtgaaaaagaagagcttgctgggagtcaaagaaaataataaaaagtccagcactagggccccttcacctaccaaacgcaaagaccgctcagatgagaagtccaaggatcgctcaaaagataaaggggccaccaaggagtcgagtgagaaggatcgcggccgggacaaaacgcgaaagaggcgcagcgcttccagtggtagcagcagtaccaggtctcggtccagctcgacttccagctcaggctccagcaccagcactggctcaagcagtggctccagctcttcctcagcctccagccgctcaggaagctccagcacctcccgcagctccagctctagcagctcttctggctctccaagtccttctcggcgcagacacgacaacaggaggcgctcccgctccaaatccaaaccacctaaaagagatgaaaaggagaggaaaaggcggagcccatctcctaagcccaccaaagtgcacattgggagactcaccaggaatgtgacaaaggatcacatcatggagatattttccacctatgggaaaattaaaatgattgacatgcccgtggaaaggatgcatccccatctgtccaaaggctatgcgtgcgtagagtttgagaatccagatgaagctgagaaggcgctgaagcacatggatggaggacaaattgatggccaggagatcactgccaccgtcgtgctggccccctggcctaggccaacccccaggagattcagccctcccaggagaatgttgccaccaccgcctatgtggctcaggtctcccccacggatgaggagaaggtcccgctccccgaggcgcaggtcccccgtgcgccggagatcacggtccccgggccgccgccgccacaggagccgctccagctccaactcctcccaataaacaggccactgaagctctcgcccctgtaacttatacgccacccagctcagttttgtcacttttctagccaaagcaagaccagtaggaaagcaaacccttgactctggcaggatttgcaggcagcaggcagcacccctctgccagccgggctccggctgcagaagtgctgttggcttggatgctgtgtgcctgtcaagattccctccggttttctggctagaaagctcacccgtttccggttttaagagtcagttcagtggcagagccaccagggacaagtgaggctcttgggggtggtttgaccctgcttacctgggagcacacttttcccttccccgatgacctgggatggtggccaggccgtgcccttgctgttgctgggcagtgtctttttggaaagggagctgccccaggctttagtgcagctgccaacgctgttaggcctggcctctcgaggcctcttctgacttcaagggtcacagccccccaaagatcctctcacccatggtagttgctgctcatggttctgtctgtccgtgcaccgatgcacacaccacaccccaccgctgtactctgaaattggcgagtgagttgagagccagctctgcggggtcatcacgcagccatggttgtgcctgtccttcatggtggtctttcaggttatcttggcaacatgtacattgcttttattttttttcttttttgcttttattgtacagtcagttctataaaatttctcttttgagttttatacctttgtagcattttagatgacattgtgtttgtactttgttgtgtagagtggaagaattgtgttgaataaacccaagatcggaatgcaaatctaaaaaaaaaaaaa

SEQ ID NO: 7244 - DNA, 438 bp, Homo Sapiens
  XM_001131725
atgccgcaccccgcggaaagcgctcgggacgccgagcgggtgcggatcccagaaccgcgcgcccgcgccgcctgcctgcctcccagatcccagctcccagccccggagcccgagcagtcgcgccgggcccggaggcagccgccaggacggagggctgccaggcgcccgaggccgacccgcacggcccccagcccgcgcccccggttgcaacccgaggccaccccctgccgccccagggccacctaccgtggcgagacgcggcgaggcagccccacgcacccagcgactcccggctctccagccgccccagccggggaagggggaggtgcccgcgcgggggcggggccgcggcgacgtgacgtacgggggcgggcccgatacgcggccccgccccgccccgccccatcccctccactgcgcctcgggaccgcgaggtga

SEQ ID NO: 7245 - DNA, 1856 bp, Homo Sapiens
  XM_001131752
gagatccaagacgcaactcccaccgccaggcggtcgcctcagaagggagccgcgtagaaggaacgcggcggtgtgccccggaagcggaagtagattctcctatagaaaggctggactacgcggagtggtgacgtttcctcattgggcggaaggttcgctggcactccgttggtcttccagctggtgggagttgacgacgtggtgctgggcgttgggaccctactttatctagttcgggaagttgggttgtggggtcatacctgtctgtctgctcccagctttcttgggtttcttccgacggcgtggggcctcgctaaggaattcccggcccctcagggccacggctttagcggtgtcttttgcgagttcttcgtaagtacatcttaaagctgtcaagatggttctagcagaccttggaagaaaaataacatcagcattacgctcgttgagcaatgccaccattatcaatgaagaggtattgaatgctatgctaaaagaagtctgtaccgctttgttggaagcagatgttaatattaaactagtgaagcaactaagagaaaatgttaagtctgctattgatcttgaagagatggcatctggtcttaacaaaagaaaaatgattcagcatgctgtatttaaagaacttgtgaagcttgtagaccctggagttaaggcatggacacccactaaaggaaaacaaaatgtgattatgtttgttggattgcaagggagtggtaaaacaacaacatgttcaaagctagcatattattaccagaggaaaggttggaagacctgtttaatatgtgcagacacattcagagcaggggcttttgaccaactaaaacagaatgctaccaaagcaagaattccattttatggaagctttaattatcacttctgtcagtttacgttgcgagacatgtatgagcaatttcaaaatatcatgaaaatgggccccttcagtcagatcttggggatgatccctggttttgggacagattttatgagcaaaggaaatgaacaggagtcaatggcaaggctaaagaaattaatgacaataatggatagtatgaatgatcaagaactagacagtacggatggtgccaaagtttttagtaaacaaccaggaagaatccaaagagtagcaagaggatcgggtgtatcaacaagagatgttcaagaacttttgacacaatataccaagtttgcacagatggtaaaaaagatgggaggtatcaaaggacttttcaaaggtggcgacatgtctaagaatgtgagccagtcacagatggcaaaattgaaccaacaaatggccaaaatgatggatcctagggttcttcatcacatgggtggtatggcaggacttcagtcaatgatgaggcagtttcaacagggtgctgctggcaacatgaaaggcatgatgggattcaataatatgtaaagaaaatgccttaatataaactgactcagttgaatacctaatttgctgagacctcagcgtttcccttctttttgcgaattggggggaaagtgtatttttcttgcttatcatgcactctttccttttcttctcgcccgcttttcccctccttttctttttccttccttctttcctccctttaatataagggagaaatacatggtttttgtggaaatcattatatgtttgctttagattttcttctgttttcaccatcataacacttaagttaaatcatgatgtaaaattttagtacttaaaggtttttaattatctcgaaggccaagcattgcatttgtaaacagtcctggtcagtagttaaataatgtttcaattaaagtgctgtaaaataaacttcaaagtggttataagttaa

SEQ ID NO: 7246 - DNA, 1342 bp, Homo Sapiens
  XM_001131797
atggcagccgagagccgggggttgagccggaagaaggaggaggcccttcaggccctgtcacaggaacggagccggctgctcgagctcaattgccttcagggaacacctggcggggacttctctgagcccaacccggccctcactaagctgctgttcacccagaagacagaccgccagctgctggtgctccaggatgccgtggcccactccgctgccacccctacttcttcctgcctcttttctgtccacagctccctgcagggctccattggcctccagaggactgggagcctgccccggaaaaggggggagagggggagccagagaggatccccccgacctctgtccttccattgtactgaatccctggaggcctcagctctcccgccagcagtgggggactccggcagataccccctctaccagctgctgaactgtggccgtgggaatagctgtggggccatccatccagacattgcccacatggagcggctcctgcagcaggccatggcggagagggagcggctgctcaaggcccgggaaggaacaagaaggggcacggaaggttcctcaggccctgctgttcctgccatcacggccccacccaccccaccccaccctccaggcccgcgaatcttggatctccggcagcatctggagggatggggccacaacccggaaaactgcccacatgtgcaggtgtctgggtgctgctgccgtggacccctggtgaagatgggcggccgcatcaagacctggaggaagcgatggttctgctttgaccgccaagcccgccgcttggcctactatgcggacaaggaagagaccaagctcaaaggtgtcatctacttccaggccattgaggaagtctattatgaccacttacgctgtgccttcaagagccccaacccccgcctgaccttctgcgtcaaaacctacgaacgccttttctacatggtggctccgagccccgaagccatgcgcatttggatggacgtcatcgtgaccgccgctgacgaaaaccacgccccctgagtggccccgccctcttggggggaagtcccttcgaggctccgccggcgcggggcgcgggggcgttcctaggccccgcccactgccggaaaacttggacgcaccgctttggaactctcccgggagttccgcaggcgcggcagttcagctggcctgagctgctgcgttctgggttgcaggtgccttgcccccgacgggatcgccggcccctaaggccctgcccggggcaggaggaagattgcaggggcgggaagaaactatttattggtgctcctgtgataccgaattaaatacggaggaaaaacaggaa

SEQ ID NO: 7247 - DNA, 2020 bp, Homo Sapiens
  XM_001131842
taggagatacaacagatgagcaaagaatgacagcaagaggcaaaacttcggacatagaggccaaccaacctttggagaccaacaaagaaaattcatccagtgtgactgtatcagaccctgagatggaaaataaggcaggccagactctggagaacagctcattaatggccgagctcctgagcgatgtgccgttcaccctggccccgcatgtgctggcagtacagggcaccatcactgaccttcccgaccacttactctcctatgatggcagcgaaaacttatcacggttttggtatgatttcactcttgaaaattcagtgctctgtgattcataacctttatgtctgtttgcaccttaacagctttaaaatatgttcgcctattttatctaacctgtttgatgttctttgccgtttcactgtttaaggtcctcagcaaggatcataaagcaaagaaaatagcattatgttcactactctatttttaagaaaaaggtacatttgtatacaaattgaacttaagttctacttcctttctcccatataataaatatacaaattaggctatgaaggttttaggaaaggactcgattccttcagatggtctctcaaaatataacacctcaaatttatcttagaagaactgtgaaaaagaattgtggcatttttcagtcactacagctccgaagtctgagcaagaagtgggtgtgaagtctcctctctggtttgtaggaagttgaattggtgttattcctgcatttttttcttccacagtgtttatgaatgaattcagaaaaaaagttgccagttagcttaatttcttcagatgcattgatgtggaaatttaaaacttgtcctaaacagcagtgctagtttgctgatacaaggatgctagacctgctctgcgtgctctttctggagtggcccatttcggttttctgaaacccatggcagccctttccatcgtgaataatcgttgtgttcccacctttgttctctgcctttttgctacttcagtgtgctctctgaccagctttccaaagaactttccctgcttctgcctcggttgccatttgctctccttaccacatatgttcccagtttatgaagagatccacatttcctttcaacccctctgcctcctgaagaaaaacatctcatgatgatacatattattgctgataacacccttatttagaaatttgttggccacaatagagatggaaatgttttactgctggaaaaactgaaatcaactcatttccaattagagtataggcagaacacctagatatgacttttagttcttgaatatccattacttactttaatgaaaacagaactgccattggtcaataaactgtaaagggaagaggtaaattgtgatagagaattttctatgtcatgggaaattgaaatcacatttattttgattaccagcaatatgatttgttaactctgtgccaagttttaagtatattttttcacaaagatagagtgccatagtgaaactaaacactgtgcataaaggtacatgaattattccagttttaaagtattatgcatgtttgtttaataaatgtggcatggttttaatacaaatgctatgttatttaaaagttagaggaacatttctattgacaaaaatatgcttcatttacatataatgttaccatatggtgttaatgattaaattagatctttacatagttcttacaaagcatcagtctaggaaatatgacttattactgatgcaaacgtgaacattttgtagtagttttgtaaaagaacatccttttcaaatatctgtgttaatgtacccttgaaattaaatgcaagcacatagtcagtttgtctaattttgtgtgaaattttgtcgaaaatacctaaacatttcatctatatttgtgcctaccatgttataaatgttcataagtaccttcatgtgtctataaaaaatgttatatttaaataaatgtgaattaaaataaaatttttgattattttcagatccagaaaaa

SEQ ID NO: 7248 - DNA, 1750 bp, Homo Sapiens
  XM_001131851
cgcacctggccgcactgcgcgagcggctgcgcgaggagctgcacgcggccgaggtgcgcaggaacaaggagcagcgagaggagatgtcgggctaagggcccgggacgggcggcgcccatcctgcgagagaacacgttcgggttttggttttgtttcgttcacctctgtctagatgcaacttttgttcctcctcccccacccccgcccccagcttcatgcttctcttccgcactcagccgccctgccctgtcctcgtggtgagtcgctgaccacggcttcccctgcaggagccgccgggcgtgagacgcggtccctcggtgcagacaccaggccgggcgcggctgggtcccccgggggccctgtgagagaggtggcggtgaccgtggtaaacccagggcggtggcgtgggatcgcgggtccttacgctgggctgtctggtcagcacgtgcaggtcagggcaggtcctctgagccggcgcccctggccagcaggcgaggctacagtacctgctgtctttccaggaggaaggggctccccatgagggaggggcaacgggggaggcgggtgatggtgtctgggagcctgcgtgtgcagccggagcttgttgaactggcagggggtgggtgggggctgcagctttccttaatgtggttgcacaggggtcctctgagaccacccggcctgaggtggacaccctgggccttcctggaagcctgcagttggggacctgccctgagtctgctggggagtgggcattctctgccagggacccatgagcaggctgcatggtctagaggttgtgggcagcatggacagtcccccactcagaagtgcaagagttccaaagagcctctggcccaggcgcctccgtgggacagccccgccgcccctccccaccagggctttgcagatgtccttgaaagacccaccctagagccctttggagtgctggcccctcctgtgtcctctgccctggtggaagtggcagccacaagtcctcctcagggagccccaagggggattttgtgggaccgctgcccacagatccaggtgttggaagggcagtgggtaaggttcccaagccagcccccacacccttcccacttggcacccagagggggctgtgggtcgaggcctgactctaggcctctcctgcccacaccctctgggctgagttccttctttcccttgaatgcccagtgctggccttggaggatggtcagctggaggacggcggtgggggaggctgtctttgtaccactgcagcatcccccacttctccacagaagccccatcccaaagctgctgcccgaccccttgctgtaaaatgtgaagggggtggctgagttctcttaggacccagagccagggccctcagcttccatcctgcgggaggccttggccgggcactgccagcgtcttccagagccacaccagggaccacgggaggatcctgacccctgcagggctcaggggtcagcacggacccactgccccatctccctctccccaccaagacagccccagaaggagcagccagctgggatgggaacccaaggctgcccacatgtggcttttgtgggactcagaaagggaagcagaaccgagggctgggatattactcatggtggcagctctcatagtgcaagcctactgtaatatgcacccatctcatccatgtagtaaagtgaacttaaaaattaaatgaacaattaaataaacacctgtgtgtttaagacatgaaaaaaaa

SEQ ID NO: 7249 - DNA, 258 bp, Homo Sapiens
  XM_001131964
atgtccagagggcactgtgttatctgcagtgacacgctgcgcctgacaccacaattggttgaagcttcagagacattgaaatcccaagccaaagaactgaaagatgcccatcagcagcaaaagctggccctgcaggagttcttggagctcaatgagctcatggcagagctctactcccagaagcagaaggtgtgggacaaggaggaggagatggaagtagccatgcagaaagctgacatgatgtggcaggagatctga

SEQ ID NO: 7250 - DNA, 873 bp, Homo Sapiens
  XM_001132263
atgaccccgtacgactctcgctgtcccccaaagctgcaaatatctgcacctgcacagctgccgcctcattccctgccctcttcggggacccagttcccaaatccaccagcccactcccttcgacatcgccccagcaggagacgagaaagggacaccaagaggcacggtgcttcttccccacctaagcctgcggcctgcggacaccccaatgcaccctgcgcccgggacaccgccgaccccgccccgctttgctctttgacaggtctctctcccggcgagggccgtggtcttcaggaaaggcccgagcccctttcccagctgcgccctaggcgcgcgccccggctgcccgcacccgccagtgccgtcgcgctcacctgggccgggaggctgacagccttgggctgtgccctgagggccctccgctcccacctcggcccgcgccccttccccgccccagctttcttcccgccaggccccctccacccgatcgccgcgcgctctccgaaccaaaaggcgacctcacgaaatgcccctttgagctcaaaggctagttacccccaggggcccttccactctcggggacaggcgaaacctctttgtctctgcctcggcctgcggcccccagcccagcctccgcgctttccctccgccagtccttgtcaatcaaacctggtgccaaacgcggcagctgaagttttcagggacacatttgcttctccccttgaagaaccagttacaaagcgtgatgtcctctctggggtcccatcagaacaaagaaacaggtctaaagaccctcattccagagagcatcctgccccatatccagaatgaaatccatgctcagagatgccaagaagaatctagacagacagg

SEQ ID NO: 7251 - DNA, 1151 bp, Homo Sapiens
  XM_001132317
atgacggacacagaagcagcttctcatctatcatcgccttttttagaagagagaccaaacatgtacaacatggcagttattatcctggagtcggcggcggcagggattgtgggaaatgtagtttggagactccgccctcctcgccattcctgtaatggctgcttcctagaaggtcgtgtcacgtggaacctcttaatctcagcatccggagctccaggaagggaaaatttcaagtcagatagaattctatatataccatttctttggaaccttcagccctcaagattccaacatcatgacctcagtttcaacacagttgtccttagtcctcatgtcactgcttttggtgctgcctgttgtggaagcagtagaagccggtgatgcaatcgcccttttgttaggtgtggttctcagcattacaggcatttgtgcctgcttgggggtatatgcacgaaaaagaaatggacagatgtgactttgaaaggcctactgagtcaaacctcaccctgaaaacctttgcgctttagaggctaaacctgagatttggtgtgtgaaaggttccaagaatcagtaaataagggagtttcacatttttcattgtttccatgaaatggcaacaaacatacatttataaattgaaaaaaaaatgttttctttacaacaaataatgcacagaaaaatgcagcctataatttgctagttaggtagtcaaagaagtaagatggctgaaatttacataagtaatatttcataatcttagaattctctcaaagcatgtgaaataggaagaaggaagttcttgcccagaatcttaggaaatcaccactgttcggttataatcactgcctcctgaatcgttgaggagtcttttaaattagatttttgttttgttgtctcccaagttaatattatatttagatatcagagagtcaggcaaaaaggaaaacttttatctctagggaaaaaacatttagaaaaatgtattcagtgtatctaatactgaaatgcggaaaaaaatttaatgttaaaaaaaaactatagacattgacatggaaaagagatttaatgttttgaaaaaaaactttatattaactgagtaacatcctcctgatgagaagtactatattaaatataaacccattatgttataa

SEQ ID NO: 7252 - DNA, 2238 bp, Homo Sapiens
  XM_001132373
gcaggtgggtctgagaaatgggcttaggtgaggcaggtctttgaaggatttgttcttaatcatatgcgagatgctcaaaaggctggatgcctgcttttgtgggtgaagagcaagaagagaaaacaggttgtacacatacagatgcagatggagagacagagaaaaaaaaggaagaaggcagagaaatgcaccaattcttgagctgtattatctctggaccttgggattgtgggaggctttattttactactgattttgcctacactgttttctcaatttctagttttctacaaagatgatgtgttagctttttcacgcattaagattaaaatttaaaacagaccacacaataaatatttcttttaaaaggagaaatatgccctgggggagctccccacgcagctgagagcctggctggttgcatttcggcttcttaggtgccaagcctactagtgccccggggtcccagccagcggctcgcgtttcctcccccttgcgccgccagtctggttgccatggagacaaaccttgctgcgcagagactgccgagccgcaggcagcggagctggaacccggcgagccagcctctgcaacaggctgggggcggaaggaggagccaggcgaagcggcgcctcagctgagaggaccggcggaccctgcagaggccccctgcccctctggctccgcccccacccgggtcgctagaaatacagccgtagccccgcccaccgcccactgcgctctgacccagacccggctgacccacctacccgcgatcctgcccatggctgacgggctctttcggcgcagaccctggggtctcgagcagattcgcccggaccccgagtccgaaggcctgtttgacaagcctcccccggaagaccctcccgctgcccgcgggcccaggtcggcgtcggccgcgggcaagaaggctggtcggcgcgcgggcgggagggcgcaggggggccgcgccgggcagcccccgaaggccgcatcgcgccccccgcccaagaaggaggcgcctccactggacgagggctgctatctcgaccattttccgcacctctccatcttcatctacgcagccatcgccttctccatcacctcctgcatctttacctatatccatttacagcttgcctgagtggccagcgcgggacggggtgggcgcaggaccgagcggggagggaaagggaaaacggggctcggcattttgtgttttagaacagcgctgcacccccttcatgtagctttcgatgcttgtttctttccgtctttgttgtcactatctttgtctatcagtacgaaagtacaaagtagctgccggcaatgaaataggggtgctgtttgcacctgcaggttaggggtggaggcgtttagaattttggggtgtgattgagccccgtttataattagaatgcccctggacccctaccactctgtgacgtgggggcacgcgcagggatcccatcattttgtgtttggggagctcagagtgcgcccaatcttggaatctttaagggatgagccagacccagacccgcggccttctagagagggtccggcagggagggtcggcgccctggcccggggtgggccggagccctgtgatgctgcatcgcccccaggaggagccagctgtgccccagagttggcgcggccgagagaggacaagagcgcgcagcaggcgaagctggagggcgggactcgactttgttgtcgctgcccggaggagtcgagactggtacccggaggagctgtctcaccaggagaccacgtcctggaagtgtccgggactcgcgggacctgtggctgcagaccccgccggcacgcaggcccagagctggcgcactcctgaggatgagactctgggggccctagccggggtccacgggagggctgtccttggggactctaggatggcttcgttctggcccggctcacttctggagctgtgagacccaagacaaaaggggctgagggatttctcattgacaagagttcgtgcgggaaaaccacctgatccctagggatttgtcatcttaagactcaaaaggcttaataccaggaaccaccttggcaagatatttacccaccggccatctctgtttactcatgaatgttaaatgttaaaacgcagcgctctaaccctgcatattatttacttgcaaatgtctgtaatctgtaattgtgatgcctctgatggaataaattatctttttcagtctcctctatatt

SEQ ID NO: 7253 - DNA, 2758 bp, Homo Sapiens
  XM_001132517
ttttgtttgcatgcaagtctcaacgtcgaggccggcagcagcggggctgagctgccccgactatctgagatcggccaagatgactgaggtgatgatgaacacccagcccatggaggagatcggcctcagcccccgcaaggatggcctttcctaccagatcttcccagacccgtcagattttgaccgctgctgcaaactgaaggaccgtctgccctccatagtggtggaacccacagaaggggaggtggagagcggggagctccggtggccccctgaggagttcctggtccaggaggatgagcaagataactgcgaagagacagcgaaagaaaataaagagcagtagagtccctgtggactcccatgggtcataccagccagcatctgttcctgaactgtgtttttcccatcatgacggaagaagagagtgagccgcaattgttctgaaaatgtcaaacgaggcttctgttttgcacctgcagatcaccgagttggttttcttttcttttcttgcctttttttttttttgaaatttgccgagcagtggagccctctgacaatttgcaaggccctctgagaaaggaagctgcttagagccagggggttagtgggtgaggggagcgagtgctgtttttgagatcattatctgaactcaggcagcctagtagaggcagtggtgggattccaatgggtcttggtgggtgggaggtggggcatgtgcaaagcaagcaaggaacatttggggtaagaaaacaaacatgaggcaaaagaaaaaatacatgtttttaagaaaacattgagcagagaactgcagccaggatgcgctcagcagacattcactctggctgctgggacatcagaaaacaaagtcttcatctctctctccagtttcacccaccccaccctttgctttcatttcaggtgtgttggtctatatgacagggaggagagtaaaggagagcaggagcaattggctgcctgcaaagccagctggaggtgaagtgcaggaaaggaaaggtcaccccattctactccatggcctctctgctcccagctgtggtaggctcacatagccagtgtgatcggtttttaagaggcagtgcttttcagcttttctccctgatatatccattttgcttcccagcactttttaggagtagtgagagcacttcctgcccttgttggaagccccagggtggacactcagcacgaaggtctctcccttaactgctgcccttccaagacttgctcccgagatggagtgggcgtggtcttccaggctggcccttccttctcctcaccgccaccttccctgccccagccccagcagccatgggtacatgggtccccagctcacctatggattcccgccagtctgcccagctgcagtactcacgccccatgggggatcttggtctgtttttcttgtgggagcctagtggagagcagacgtggctttttatgtgtcttgttggggaggtgacttgcatggtggggacaaggctgtcgtggcaaccttgggatcgagtttgagactaaaggatgtcatgagatccctggcttctccccatgttgttcccggacaagggcagaagggaggcatggcaagggacctctgctgtccttactcaacagtggtcctcatccctccccacctcccactgcttcctgcaagggcaccagttgtatgagaaagttggcctttggacttaggatttcttattgtagctaagagccatctgaagcagcaggttgcaggacaaatgcttcagtccgccgagagcagtaccgtgtggccaagaggtggactcagagccttccttgagctaaactcggccaaccaaggcacgcagcatgtcccctcaggtctccagtcagtccaggttgaccctcagttctggacgtgtgtatatagctgtatttaatacctcaaggtcattgtggctctggggatgccggggcaggaggacgagggtgcgctgtggacacagcagtccgcggaattccgttctgggaagccaatggtcgccggcaccccttgcttcctccctctgttgtctgcctgtgtgacacacatcaatggcaataacttcttccaactcctcgcagaagtgggagaggccggcagcctgcaccgagaggggctttcctctctcttgctccccgcttcgttctgttttggctgcagagagtggttcatccatactctcattccctcgcctccccttgtggacgggggtcttgccttttcaattcctgtgttttggtgtcttcccttatctgctaccctgaatcacctgtcctggtcttgctgtgtgatgggaacatgcttgtaaactgcgtaacaaatctactttgtgtatgtgtctgtttatgggggtggtttattatttttgctggtccctagaccactttgtatgaccgtttgcagtctgagcaggccaggggctgacagctaatgtcaggaccctcagcggtggagcctgctggggggacccagctgctcttggacaagtggctgagctcctatctggcctcctctttttttttttttcaagtaatttgtgtgtatttctaactgattgtattgaaaaaattcctagtatttcagtaaaaatgcctgttgtgagatgaacctcctgtaacttctatctgttcttttttgaggctcagggagaaactagcatttttttttttccaaactactttttgtcactgtgacagttgtaaataaagtttgaaaatgctttccactctg

SEQ ID NO: 7254 - DNA, 1928 bp, Homo Sapiens
  XM_001132609
cctgcctcagcctccagagtaacagggattacaggcatactccaccttgccctgctgattttgtatttttagtagagacaagagtttcaccatgttggccaggctggtcttgaactcctgacctcaagtgatccactgcctcagcctcccaaagtgctgggattataggcgtgagccactgcgcctggccaaatgctctactttttaatcaatgttttccaaaatagggatttttgctatgtgctttagaaattagagaacaaacggtgataatatatgctaaacttaaaattagtatgcctccttttatagacaacaagaactttgtcacttcccagtttgtcttgtcattcaggaggctcagagctacgatctgtgcccactcgtgctgcctcttcttaactttgatttcctgaagcagcgatttcatctccgtttcccctcatcacctgttcttttaactgtttaaaaacagcattacatgttgttgcaagtggcctcaaattctttttggtagaagggaaattgtaatccgtgagaagaaaaaaattttcctaactattctcaggtgtgtttaagggctgcattccatgatgctatcagtgccttctttcagctcacaggatatcggccatgttaatgagtctgatgttgctagtatcacaggcaccggaaaatatgcacattatgctggagcattagaatgcaacagaaagagccctgggcttggagtatgcagaactggttcttgttacaactcctcttactagtgggctctggaagaaaacacattgaattcatgatcatggttaacctttggagagagagaggagaccaggatgaaggagccagtcgaagatcctgttcaagtgtacactgagccagcaggttcaccagaaagctattgagcgtttgctggaacacattatgcagggtgaatttcttctggaatgttgccaaggattttttatgcttctgtggcaggcatttcttgaacattgtcatttagccaagcaaagaagattttcttaaaggatagaaaatgtttaaaaatttttgtttgtttgaagataggttaaatggctatatgatctcaggataagacagagaaaatcacttatttctctaagtgatctgattaggttagtgatgttttgcctttaaacagattcatcattattcctaaagtattgctgtattaatactgtcttctagaaagtatccaccagtgcctacttttcttcgatatcattagctgtttttcgaaactgaatttgctcttcagagatttctcatatgtttgcgtataaggaactactggtaatagccaagaaaatttggaggtgcagagaacatgctgaaacagaatttttcactttcaattctagaactatgccataaaaaaaaaggaaaatgtaaaaatgtctttatattagagcagatattttaaaagtattgcaaattcaatgataaattctaaggttaaaattggacacataaaaaatacaatatataaatatctccccagaaattattatctaatgaatagtaaaagctgactacaaaccatgtcattttaacaagggtttaaatagtaccaagattctcatcatatgctctgggatacccagtgatgtacaagggttctctctaaacatggggaggaaaaatttcaaatataaagatttgaatcttgtctttgccattcactagctgtgtgatcttgggtaagttacctggtttctctgagcttcagtgtcatctgtaaaacaggaataataatacctagctcagaggcgggtgtggtggctcacgcctgtaatcccagcactttgggaggccaaggcaggtggatcactaggtcaggagtttgagaccagcctggccaagatggtgaaatcctgtctctacttaaaaaaaaaaaaaaa

SEQ ID NO: 7255 - DNA, 1380 bp, Homo Sapiens
  XM_001132636
agagtgcgcggagcattggggctttccagctctcacagaaccttcagcatccccagctgccggtcttggcatcttcgaagtaaggagagttttagatgcttctggatgttcaatgctagcacctttacagactggagcagctcgattttcttcgtatttactttcaagagcaagaaaagtgctgggctcccacttattttctccctgtggtgttccggagttctgctccatatccaccagaaagctggcggcccacggctttggcgcatccatggcggcaatggtgtccttccctccccagaggtatcactactttttagtgctggactttgaggccacgtgcgacaagccacagattcatcctcaggaaatcatcgagttccccatcctaaagctaaatggccggaccatggagattgagtctacctttcacatgtatgtccagcctgtagtccatccacagcttaccccattctgtacagagctcaccgggattattcaagccatggtggatggtcagccaagcctgcagcaagtgctggagagggtcgatgaatggatggcgaaggaaggcctcttagatccaaacgtcaagtcaatttttgtcacctgtggagactgggacttaaaagtcatgctcccaggccagtgccagtacttgggcttgccagtggcggattacttcaagcagtggattaatctgaaaaaggcttacagcttcgccatgggctgctggcccaagaatggacttctagacatgaacaagggcctcagcctgcaacacataggccggccccacagcggcattgacgactgcaagaacattgccaacatcatgaagacactcgcctatcgaggcttcatcttcaagcagacatcgaagccgttctgattggccgaggacaggatggggcaggacagggtagctgtttggcccagcccagaatcctcctctccctcaccagaggggaagagggagagtggcatagctctgtgtccagagtgtccccagctgccctgtgggctcatgcccttggcgtgggcttgtgcccttgcaagggcttggccacttggcccttctggagcagacactttgtgccccccatccccacccctcaatctcagcccagtatcagcccctcccattgcgggcctgggctagggggacccaggcactcaccgcctcctccctggtacacaggcttctgtggggccaccaagcccctcctgtgccccctcccatccatagtgcatggtgtgtggtgcccccagggctccaggacagatcaggccccaccttgtgtctacccccatccccgctgtgaacgtgccactgaataaagtcggggaaacgaggcactgggtgtgtgtgcaaagcca

SEQ ID NO: 7256 - DNA, 1309 bp, Homo Sapiens
  XM_001132706
gctgcggccccgccccctggccgcgtggctgcgcgtcctggctgttgccgataaagttgtttgacgccggcccggcggcgggtcacgtgagcggaaaatggcggccccggcaggcggcggaggctccgcggtgtcggtgctggccccgaacggccggcgccacacggtgaaggtgacgccgagcaccgtgctgcttcaggttctggaggacacgtgccggcggcaggacttcaacccctgtgaatatgatctgaagtttcagaggagcgtgctcgacctttctctccagtggagatttgccaacctgcccaacaatgccaagctggagatggtgcccgcttcccggagccgtgaggggcctgagaacatggttcgcatcgctttgcagctggacgatggctcgaggttgcaggactctttctgttcaggccagaccctctgggagcttctcagccattttccacagatcagggagtgcctgcagcaccccggcggggccaccccagtctgcgtgtacacgagggatgaggtgacgggtgaagctgccctgcggggcacgacgctgcagtcgctgggcctgaccgggggcagcgccaccatcaggtttgtcatgaagtgctacgaccccgtgggcaagaccccaggaagcctgggctcgtcagcgtcggctggccaggcagccgccagcgctccacttcccttggaatctggggagctcagccgcggcgacttgagccgtccggaggacgcggacacctcagggccctgctgcgagcacactcaggagaagcagagcacaagggcacccgcagctgccccctttgttcctttctcgggtgggggacagagactggggggccctcctgggcccacgaggcctctgacatcatcttcagctaagttgccgaagtccctctccagccctggaggcccctccaagccaaagaagtccaagtcgggccaggatccccagcaggagcaggagcaggagcgggagcgggatccccagcaggagcaggagcgggagcggcccgtggaccgggagcccgtggaccgggagccggtggtgtgccaccccgacctggaggagcggctgcaggcctggccagcggagctgcctgatgagttctttgagctgacggtggacgacgtgagaagacgcttggcccagctcaagagtgagcggaagcgcctggaagaagcccccttggtgaccaaggccttcagggaggcgcagataaaggagaagctggagcgctacccaaaggtctgcagacaggatgtgggggcgactgaggcacagctctga

SEQ ID NO: 7257 - DNA, 1404 bp, Homo Sapiens
  XM_001132754
atgggtcaccccagccctggcatctgcccagagcccgagaaggaaggaacaatgatcctccagctacctcacagggctggcacagcccctgttctcattctgcaaatggtgaagctctctattgtcctgaccccacagttcctgtcccatgaccagggccagctcaccaaggagctgcagcagcatgtaaagtcagtgacatgcccatgcgagtacctgaggaaggttatcaatagtctggctgtctatcgtcatcgtgagactgactttggtgtaggagttcgagaccaccctggccaacatggcaaaaccccatctccacaaaaattggataatttgataattatcattattgggtttctgagatgttacacatttaacattctcttctgcacaagttgcctttgtgtgtctttcctgaagactatcttctggtctcgaaatggacatgatggatccatggatgtacagcagagagcctggaggtccaaccgcagtagacagaaagggctgaggtccatttgtatgcacacaaagaaaagagtttcttcctttcgaggaaataaaattggcctgaaagacgtcattactctacggaggcatgtggaaacaaaagttagagctaaaatccgtaagaggaaggtgacaacgaaaatcaaccgtcatgacaaaatcaatggaaagaggaagaccgccagaaaacagaaaatgtttcaacgtgcgcaagagttgcggcggcgggcagaggactaccacaaatgcaaaatccccccttctgcaagaaagcctctttgcaactgggtcagaatggcggcagcggagcatcgtcattcttcaggattgccctactggctctacctcacagctgaaactttaaaaaacaggatgggccgccagccacctcctccaactcaacaacattctataactgataactccctgagcctcaagacacctcctgagtgtctgctcactccccttccaccctcagtggatgataatatcaaggagtgtcctcttgctcctcttccaccctctcctcttccaccctcagtggatgataatctgaaggaatgtctctttgtcccgcttccaccctctcctcttccaccctcagtggatgataatctgaaggaatgtctctttgtcccgcttccaccctctcctcttccaccctcagtggatgataatctcaagactcctcccttagctactcaggaggccgaggtggaaaaaccacccaaacccaagaggtggagggtggatgaggtggaacaatcgcccaagcccaagaggcagagggaggccgaggcacaacaattacccaaacccaagaggcggaggttgagtaagctgagaacacgccattgcactcaagcctgggcaataagaataaatccgtag

SEQ ID NO: 7258 - DNA, 285 bp, Homo Sapiens
  XM_001133019
atggttgttcagtttcttggttttcttttagctttggaatcgtcctctgggaaatcgccactggagatatcccgtttcaaggtgaagaatgtgaagactggctcagccagtggctgtaattctgagaagatccgcaagctggtggctgtgaagcggcagcaggagccactgggtgaagactgcccttcagagctgcgggagatcattgatgagtgccgggcccatgatccctctgtgcggccctctgtggatgagcagaagcgcagacttaatgatgtgttctga

SEQ ID NO: 7259 - DNA, 3287 bp, Homo Sapiens
  XM_001133059
ttttcgattccactctcttccgtttctgtcgctgcagtcgtccgcggtgcggcacattcgttcccctaggactccggccggttgccggccccaggcggtgcttctccccaccaccgcccagctcagctcagcccagcccagcccactctgcccttagaggcccttctccccaaagacgcactccagaagtctcgccctcgtgcggctgaggagcctgggatcccagacctgaacaagtgaaacccccgcccctgaagaatgggtaagacgttttcccagctgggctcttggcgggaggatgagaacaagtcaatcctgtcctccaaaccagccattggcagcaaggctgtcaactactccagcaccggtagcagcaagtctttttgttcctgtgtgccttgtgaaggaactgctgatgccagcttcgtgacttgtcccacctgccagggcagtggcaagattccccaagagctggagaagcagttggtggctctcattccctatggggaccagaggctgaagcccaagcacacgaagctctttgtgttcctggccgtgctcatctgcctggtgacctcctccttcatcgtctttttcctgtttccccggtccgtcattgtgcagcctgcaggcctcaactcctccacagtggcctttgatgaggctgatatctacctcaacataacgaatatcttaaacatctccaatggcaactactaccccattatggtgacacagctgaccctcgaggttctgcacctgtccctcgtggtggggcaggtttccaacaaccttctcctacacattggccctttggccagtgaacagatgttttacgcagtagctaccaagatacgggatgaaaacacatacaaaatctgtacctggctggaaatcaaagtccaccatgtgcttttgcacatccagggcaccctgacctgttcatacctgagccattcagagcagctggtctttcagagctatgaatatgtggactgccgaggaaacgcatctgtgccccaccagctgacccctcacccaccatgacctgtctgctgtccctgtactccaggcacctgcaaccctggtctatatctcccacaactccctggtgactaaggaaggactacagaggctttgccaaaggagaagccctgcctcatcacacccttacctcccaccccctcagcacaggaagcttgctttgaagttaacttcatacacacacactcatatcctccagtttcccccagattctttcaggggctgccatcagattctgcccttggttagttttttgttttttttttggtagagacagagtctcactgttggtccaggttggttttgaactcctgggctcaagcgatcctcccttcttggcctcccaaagcacttggattacagatgtgagcctgtgcctggctggtctttcttgaggaaaatctgacctggcattttcttgaggcaccttagattccctggagtggcacctggcctttctgtactgagcacctggtcagtctgaagggggcatttcaccccagctccatcagggctggctgtcccgtctgaatgtggagagagctgtagttttatctggcttttaaaacatggacctgccggctgggcgcagtggcttacacctgtaatcccagtactttgggaggccgaagtgggtggatcacttgagggcaggagttcgtgaccagcctggtcaacatggtgaaaccttgtctctactaaaaatacaaaaattagctgggtgtggtggcatgcgcctgtaatcccagctactcgggaggctgaggcagcagaatcacttgaaaccggaaggcagaggttgcagtgagccaagatcgtgcaactgcactccagcctgggcaaaagagcaaaactttgtctcaaaaaaagactcttttcaagttttctaccctctgataagaaaatttggggatatccagtgccatctccaaggactttcaggggatcatagatgcttttctgtgcctatctgctttgaccatgtgaaaaagtgatagtctgcttctctctggtaacttgtctgccacccatctgatagtaagattagccaaggccctttagccctctgtcctttctggttattgactgtccctggttcctaggaagacagagttgttctccagctaaagcgtctcctctctataaagtagttttactattcttttcatagcaggagccaaaatagtagaggaggggagagaggcacctggcactctgcgggcctgcacaggaaaaacagagccaaagacagaatcattgtataagatatttattaaaggagagcctctaagtccacatcctgagcccatgtgagtggacacaggtaggtaaaacggtgggtccagctgctgtcatctgaaagccttcaggagatgaagctatcagtatccagctgaaggctgctgggttctgttccaccaccaccttagcaccagggccctctctggtcccagaggcctcatctctccttgggctttgacaatgtggagcagcacatcagcagggactggtctagaccctccctttcctgtcacttagctggagctaagctccagataacccctaggttcccactggctcctagtagaaatagtttctgtactttagcagaacaggaaggatatttgttcattaaaggtggcttggtcttacagctgggtgcagtggtatatacctgtagtcccagctactcaggaagctgaggtgagaggatctctagagcccaggaattcaagtttaacatgagcagcaacattagcaagaccccgtttaaaaaaaaaaaaagagctgggcgtaatggcgcacacctgtaatcccacctactcaggaggctgaggcaggagaatcacttgaacctgggaggcagaggttgcagtgagccaagatcgcaccactgcactccagcctgggcaacaagggcgagactctgtctcaaaaaaaaaaaaaaaaaaagatggctgtctctttatcattcagacagaacgatgaacacaggtgagcagggaaagctaattttgaagtaggatgcatggagagggagaagtggtgacagaacttggtaactagctggctgggggaacgaggggaaggaaggagactgctgtctccaagctgaggtcagggtggtgttggcaagagcgcaaaagtccagggaagccaggctggagctgctgtgtatagactgccaaatgtgaagtatttatattgtattcaataaactatacttaagagtgttcaaaaaa

SEQ ID NO: 7260 - DNA, 3302 bp, Homo Sapiens
  XM_001133074
actgagtcaaagcttgaggggagtgttcgctcccgcattttcgattccactctcttccgtttctgtcgctgcagtcgtccgcgggactccggccggttgccggccccaggcggtgcttctccccaccaccgcccagctcagctcagcccagcccagcccactctgcccttagaggcccttctccccaaagacgcactccagaagtctcgccctcgtgcggctgaggagcctgggatcccagacctgaacaagtgaaacccccgcccctgaagaatgggtaagacgttttcccagctgggctcttggcgggaggatgagaacaagtcaatcctgtcctccaaaccagccattggcagcaaggctgtcaactactccagcaccggtagcagcaagtctttttgttcctgtgtgccttgtgaaggaactgctgatgccagcttcgtgacttgtcccacctgccagggcagtggcaagattccccaagagctggagaagcagttggtggctctcattccctatggggaccagaggctgaagcccaagcacacgaagctctttgtgttcctggccgtgctcatctgcctggtgacctcctccttcatcgtctttttcctgtttccccggtccgtcattgtgcagcctgcaggcctcaactcctccacagtggcctttgatgaggctgatatctacctcaacataacgaatatcttaaacatctccaatggcaactactaccccattatggtgacacagctgaccctcgaggttctgcacctgtccctcgtggtggggcaggtttccaacaaccttctcctacacattggccctttggccagtgaacagatgttttacgcagtagctaccaagatacgggatgaaaacacatacaaaatctgtacctggctggaaatcaaagtccaccatgtgcttttgcacatccagggcaccctgacctgttcatacctgagccattcagagcagctggtctttcagagctatgaatatgtggactgccgaggaaacgcatctgtgccccaccagctgacccctcacccaccatgacctgtctgctgtccctgtactccaggcacctgcaaccctggtctatatctcccacaactccctggtgactaaggaaggactacagaggctttgccaaaggagaagccctgcctcatcacacccttacctcccaccccctcagcacaggaagcttgctttgaagttaacttcatacacacacactcatatcctccagtttcccccagattctttcaggggctgccatcagattctgcccttggttagttttttgttttttttttggtagagacagagtctcactgttggtccaggttggttttgaactcctgggctcaagcgatcctcccttcttggcctcccaaagcacttggattacagatgtgagcctgtgcctggctggtctttcttgaggaaaatctgacctggcattttcttgaggcaccttagattccctggagtggcacctggcctttctgtactgagcacctggtcagtctgaagggggcatttcaccccagctccatcagggctggctgtcccgtctgaatgtggagagagctgtagttttatctggcttttaaaacatggacctgccggctgggcgcagtggcttacacctgtaatcccagtactttgggaggccgaagtgggtggatcacttgagggcaggagttcgtgaccagcctggtcaacatggtgaaaccttgtctctactaaaaatacaaaaattagctgggtgtggtggcatgcgcctgtaatcccagctactcgggaggctgaggcagcagaatcacttgaaaccggaaggcagaggttgcagtgagccaagatcgtgcaactgcactccagcctgggcaaaagagcaaaactttgtctcaaaaaaagactcttttcaagttttctaccctctgataagaaaatttggggatatccagtgccatctccaaggactttcaggggatcatagatgcttttctgtgcctatctgctttgaccatgtgaaaaagtgatagtctgcttctctctggtaacttgtctgccacccatctgatagtaagattagccaaggccctttagccctctgtcctttctggttattgactgtccctggttcctaggaagacagagttgttctccagctaaagcgtctcctctctataaagtagttttactattcttttcatagcaggagccaaaatagtagaggaggggagagaggcacctggcactctgcgggcctgcacaggaaaaacagagccaaagacagaatcattgtataagatatttattaaaggagagcctctaagtccacatcctgagcccatgtgagtggacacaggtaggtaaaacggtgggtccagctgctgtcatctgaaagccttcaggagatgaagctatcagtatccagctgaaggctgctgggttctgttccaccaccaccttagcaccagggccctctctggtcccagaggcctcatctctccttgggctttgacaatgtggagcagcacatcagcagggactggtctagaccctccctttcctgtcacttagctggagctaagctccagataacccctaggttcccactggctcctagtagaaatagtttctgtactttagcagaacaggaaggatatttgttcattaaaggtggcttggtcttacagctgggtgcagtggtatatacctgtagtcccagctactcaggaagctgaggtgagaggatctctagagcccaggaattcaagtttaacatgagcagcaacattagcaagaccccgtttaaaaaaaaaaaaagagctgggcgtaatggcgcacacctgtaatcccacctactcaggaggctgaggcaggagaatcacttgaacctgggaggcagaggttgcagtgagccaagatcgcaccactgcactccagcctgggcaacaagggcgagactctgtctcaaaaaaaaaaaaaaaaaaagatggctgtctctttatcattcagacagaacgatgaacacaggtgagcagggaaagctaattttgaagtaggatgcatggagagggagaagtggtgacagaacttggtaactagctggctgggggaacgaggggaaggaaggagactgctgtctccaagctgaggtcagggtggtgttggcaagagcgcaaaagtccagggaagccaggctggagctgctgtgtatagactgccaaatgtgaagtatttatattgtattcaataaactatacttaagagtgttcaaaaaa

SEQ ID NO: 7261 - DNA, 2882 bp, Homo Sapiens
  XM_001133149
tttttttttttttttgaggcggagttttgctcttattgcccaggctggagtgcagtggtgtgatctcagctcactgcaatctccgcctcccaggttcaagtgattctcctgcctcagcctcccgagtagctgggaccacaggcatgcgccaccacgcccggctaattttgtatttttagtagagacagggtttctccatgttggtcaggctggtcttgaactcccaacctcaggtgactcacccgcctcggcctcccaaagtgctgggattacaggtgtgagccaccgcgcccggccaggttttaaatattaatctagcttgctatttcctgcctgagaggtgaaagggaggcctcattacagagaactgagatgaaagcaatgatgaagggaccctgggaccctgcctttcctctccctactcagcaggagcttatgaagtcatctcactttctcttctgtcccccctctcctcttcatgcaggtataaagaaatatgaggccccaattggaacagcagcatggagggtcccagttgggtccccaacgtgctccccatgggcaagacaatggaaacttccacaagcagggaaggcaaaccctctttattgaacattagccagcccagcccagaccccagggctgcctaaggacacagagattctccatgggaaggggactgccaagcatgaggaaatagaagattcaggggcctgagctctggaagctgcaagcaaaagggatgggactagggctgagttgtgtctccattttgataaggaaaggatatgctcagactcttgcttgttcagattccaagacagaaggcttcacaaggccaacgcctggaaaatgggcatctctccttcccatgttaagctttaacctctgtaatctgcctgtatctataggtgggcatctcactccaccaaaggagcccagcctctctttgtccctctatccatgcaacagtcttctctgtgcatttccccaagctgggccctcttctactctccatttaggcctgttgataactccattacccgcccatcactgctgttcctccagggccagcactcgggcgaggcaggggagctgccttcggtacataatttgaaggggcactccctcttgggcacatgccggccctgagtgcctcccttgcctcactctgatcctggccccataatgtcctcagtggaaggtgatgggggccggtgctgtggggagagtagaaagaggggttggcatgactaaaaataccagtatgtgtattaagtattttgagaatgaaatgccaaggagtgcctactatatgccagctctaggaatggagtagacagtggacacaagaaggacttacgccctgagcacaggtgccaatggtgacaagactggcaagacgtgagggcatgaatggttcattcaggcagctgctgcagatgtggtcacctggtgccatctgctgctcccttttccacttttctatgtcctccttccaccccaagtcccggatcactcgctgttttctggctagctcttggcatctccatctgagcctaaagttgcccactggcaccaatagattctgtttgacctgctgtgcccatgctcatctttgtcggggcttggcttggcagcgagcgaggctggcatggggtgctgaagtggggtctcagtgaggggtgacagcgtgctggcagtcctcacagccctcgctcgctctcggcgcctcctctgcctgggctcccactttggcggcacttgaggagcccttcagcccaccgctgcactgtggggagcccctttctgggctggccaaggccagagcaggctccctcagcttgcagggaggtgtggagcgagaggcgcgagcgggaaccggggctgcatgcagcgcttgcgggccagctggagttccgggtgggcatgggcttggcgggcctgcactcggagcagccggccggcccttccggccccgggcagtgagggacttggcacccgggccagcggctgcagagggtgtactgggtcccccagcagtgccggcccacctgcgctgtgcttgatttctcgctgggccttagctgccttcccgcggggcagggctcgggacctgcagcccgccgtgcctgagcctcccacccgctccatgggctcctgtggggcccgagcctccccgacgagtaccaccccctgctccagggcgcccagtcccatcgaccacccaagggctgaggagtgcgagcgcacggcgcgggactggcaggcagctccacctgcagccccggtgcgggatccactaggtgaagccagctgggctcctgagtctgatggggacgtggagagtccttatgtcctgctcagggattgtaaacacaccaatcagcaccctgtgtttagctcaaggtttgtgagtgcaccagtcgacactctgtatctagctgctctggtggggcctcggagaacctttatatctagctcagggattgtaaatacacccatcggcactgtgtatctagctcaaggtttataaacacaccaatcaacaccctgtgtctagctcagggtttgtgagtgcaccaatcaacactctgtatctagctgctctggtggggccttggagaacctgtgtgtcgaaactctgtatctaactaatctgatggggacgtggagaacctttgtatctagctcagggattgtaaacgcaccaatcaacgacctgtcaaaacaggccactcggctctaccaataagcaggatgtgggtggggccagataagagaataaaagcaggctgcccgagccagcattggcaactcgctcgggtccccttccacgctgtgggagctttgttctttgcaataaatcttgctactgctca

SEQ ID NO: 7262 - DNA, 3906 bp, Homo Sapiens
  XM_001133211
ctattgaactgctttcattgaaagctcatttattgactgtatggctgtggatcagtttcaggtctcttaactcagtctgtttatctatttgtccctcctgatgccttgtctgtaatagcttatagtaagccttgaagtcagatagtacaagtccttgttcttttgcacacattgcaataactgggtctggatttagtcccgttagtctgagtgggactaatgccactataaaagggaccccagggagctctctctgccccctgaggatacaatgagaaggtggcagtctacaaccagaaaaaagtccctcatcataaccctaccatgttggcaccttgatctcggacttccaacctccagaactgtgagaaataaatttctgtcgtgaattagccacccagtttatggtatatagttatggaagcccgaactaagacagagatggaatcccatggagggtctctaatttgctgagctggtcatcaggtgggatgttgcaagttagaaacaagaagagctgacattttgtgcatatgaaagaagatagtggacaggcccattgtcgtcggctttgtccgccttggcgaactggagacggaagctagattcaccttcgacagccacgggaggaccgggaggacctccagaggaggttaggtcgacctcatggtaactttagatcctgaaaactcacaggatttttcttgtcttccctttgatctctcttccgcctactcaacaggacaggactcaccgcctttctttcccgtcagaaagggatcccttccggacaggacagaagtgagcagatggtttcccctacgtgtctttccgggcctgggcgtctcaggagctcaggctgacctgagacctaactcctggcaagtgggaccagcaggagcctggaagagcgcgcgcaccggggtggaggttgggcgccgggggtggagaaccgcagtcaaatcctcttcttccccgcgcaccgcgcacctgcccccggggatgccgaacgaattggcccataaagcttctctgcaacggaaagaagcctgaagctccaggaggtgcgagaggagcctcgttgagcgagcccagccctctgcccggctggccctggtcaacaggctcggaagaggccgatttggaggacagaacggaagacaagacctaaaggtttcgaatctcatgatgtggagatgttaaagcctaaatcctaaggtccgactgtgagggggagcgagggtgtctcgagctggatccacccttgagccttcacctggagagtcctctgcacaagttcagagagaaggactacgcgcagcaatggttctcaacagggggcaacttcgccctcacatgcctctcccaaccccgctgggacactaggccgcggctgggggaagcgggagggagaatgttatccccctggcatgtgtctagtcagcggaggagacagatgctgctaaacaccttgcaatccacggcgggagggcccctcccccaccccgaagtagccattcggcagaggtggagaaactcgcgtgtagatcaatgcccacgcacttggccgacggaaatcacgaattggtgaccaattggatcttggatctgaggaaaaagctccagcttcagagggaactctcgaagttttgcccagagcaaacggaggggttgcgttgccatcgcctaaaatgggaaaatggcaggcgtcacaggttgcaggggaaggttggagaccagttgagtgccccggagccttcctggaaagagtttcctatccagcccgtctcggtttccgcatccgtctgattccttatgatgttgagggtgccggggtctgggtcctttatgatgcagagggtgcccctgtctcacctcgggcgcctccccgctcccgcctcctcctggcaacctggtgggcggctccggacccggcgacccgcgaccatcttgtcagttgctgccgcctcgcaaagggcatctctaggccagtggtgagctgcggccgcgtggccgcaactcgctccagtactcaggactccctcgtggagtccttggtgtgtcgcctgcaggttctttttttgaagaaagcagggagtgaacggccttgtgagacgactccaggagcaaagggcgactctcacaagacccaagtcctcctagagcacaggaaagtgtcgcttcaggtcgaagaagggagagaaagcagctttccgcatctgcatggttgtctagtggctaggattcggtgctgaaagagccacggcccgggttcgattcccggtcagggaattgttttgcactggccgccctcccgcagaaatcttcctttaccacgctgtcagccggcctgctccaagggccagatgtagaacagcctccgcagcgaggggcaaacccgggcaaaggagggcaagtcgtggtgggccacctctcacgtttatctccgtgtctgtcatccgcagaagcggctttagagagcgactgagcgtctcgctcaggtgtacacagccgtgcagagaggccagtccccgtggagctgcacttaataagcgcaccctctttgccgtcgccgccccagaggtgcctatcgggctgagctgtgaataactaagagagaggccaagccaagtcatggcgtttgtgcgtgccctggacgtgggcaccggtcagtcagcggagcctcctcacctccgttcgcagctaacatgctcgttaggccttcggaagaggcgaccggaggcgatgcccgcgaagttgggaggggagtgagcggcgggtgaggtcctcaagggcggtcccttttgctgattgagcggtagagggaggcgatgttcgctgacccaacaaagacagcaggtggagtaggcacaaacggaaaactgttgccagtgccctaagcagaatgcaggtgtaaaaatcagcactaggacgtcaaagcgatggtaccacagtcaaatcccacaatgtctacactctaccaagcacttgcgcacgctcccccttttccattcagtattcccaagaggggtttggaagaaccccgcgtccactgtaagctcaggggagagcgggagccagggaggtgaagtgcacagactggacagaggcggcgggcagaaccgcgggggtgagagggcgcgtggttgcggggcgggagccactgctgaaaggcggcctgggttgtcgtgtggggtgactgtcggtggaatctttggcagagagtggtttggaagaatggcgaagggggcagtgggtagggtggtgaccctgagcgtccgaccagggcgaggacgctgtgctgtccctgcagggcatgcgctcattcccacttacctggcaggaaagagaccgtggtcacgaagggggttctcccagagtgaagcttcttcatcgcactctagagttgctgatctctgtgatttcttcaatgtgggaaacggtgtttgtgctagaagagggctgcgctctctacctaacataaacggggttcaaaactgacatcgcctcacgcctacccgaaaacgtttacgtggcttccttgtctctttgttttttctgtcctaaagtcgccttatcctcacaccccctcatgtttttcttccacactcgagagtgtctctccgtctcattaaaagctccaccaaatatttgaaatatctcaaccagaaaggctgcaatgaatacagtatttcatttgtggaagctacagaccagctaggttgagagttgcttgatattttctgctaaaccgtgaggcatagagcacttggaaggtttctctttgggcctttgtttgtgtactattgggtttccttcttttccccagaccgtatggcgctgtggggccagcggtaaaccctgctttctggctgcagataaaggccgcagctggtgcaggaatta

SEQ ID NO: 7263 - DNA, 2286 bp, Homo Sapiens
  XM_001133269
atgaaggcattttcccaagaaggccacctggcctctctaaactccccctcattactccctgatagcaactggtcccaccccaggtttcatcctatcctaagagccaagcccaataatgcgtggcatgccaccgtcccctctgaaaacgaagtgaccacggaagtcccacgagactccagcagccctgaccacagccgattggacccacagcagacacggaatattctaacgtttagtgtaatccaaaatgagatgacagaggcaggagatgcaaatgccatgagaaggtcaagcagatcagaagatattttggaaatagatgaacgcaaggaccacagacagctgagcagctgtgtgtttattcccctcacgtttcgttccttcaggggccagggacagccatgtgttctttggcacacagggtgctgttcaggacttccagaggattccagggctccaccttcctgtatcaccagcagcacggtctcatatggatggatggtgcaagtacctccagggctccatgtcaccaccccacctcccccactgctccccagtctcacattcctccataagacacccctggaaagctttgccacagcaatccatggcttgaaagtgggacacctgacagatcgtgttattcagaggagcaagaggatgattctagacactctgggtgctgggttcctgggaaccactacggaagtgtttcacatagccagccaatatagcaagatctacagttccaacatatccagcactgtttggggtcagccagacatcaggctcccgcccacatatgctgcttttgtgaacggtgtggctattcactccatggattttgatgacacgtggcaccctgccacccacccttctggggctgtccttcctgtcctcacagctttagcagaagccctgccaaggagtccaaagttttctggccttgacctgctgctggctttcaatgttggtattgaagtgcaaggccgattactgcatttcgccaaggaggccaatgacatgccaaagagattccatcccccttccgtggtaggaacgttgggtagtgctgctgctgcatccaagtttttaggacttagctcgacaaagtgccgagaagctctggccattgctgtttcccatgctggggcacccatggccaatgctgccacccagaccaagcccctccacattggcaatgctgccaagcatgggatagaagctgcatttttggcaatgttgggtctccaaggaaacaagcaggtcttggacttggaggcaggatttggggccttttatgccaactattccccaaaagtccttccaagcatagcttcctacagttggctgctggaccagcaggacgtggcctttaagcgttttcctgcacatttatctacccactgggtggcagacgcagctgcatctgtgagaaagcaccttgtagcagagagagccctgcttccaactgactacattaagagaattgtgctcaggataccaaatgtccagtatgtaaacaggccctttccagtttcggagcatgaagcccgtcattcattccagtatgtggcctgtgccatgctgcttgatggtggcatcactgtcccctcattccatgaatgccagatcaacaggccacaggtgagagagctgctcagtaaggtggagctggagtaccctccggacaacttgccaagcttcaacatactgtactgtgaaataagtgtcaccctcaaggatggagccaccttcacagatcgctctgataccttctatgggcactggagaaaaccactgagccaggaggacctagaggaaaagttcagagccaatgcctccaagatgctgtcctgggacacagtggaaagccttataaagatagtcaaaaatctagaagacctagaagactgttctgtgttaactacacttctcaaaggaccctctccaccagaggctgcagagggaagagaaagcgcccccgtggcgcccccagggccgtgcagcccagacctagccccgcagccccacataccccagcacctccgaagctgcgtgcagagccgctcgctcccacctccggctgcacccgcgcgcccccttgcggcggattccgctctggcgcatagccccactggagcgctggcgcgttggcgatggggtcccaggtgggagagagatctgtccgctgaacctgcgcatcccggcccctgcggaggctgcagagattctgccctttctgttcggagggaagagagagggcgccagggagacataagctag

SEQ ID NO: 7264 - DNA, 2153 bp, Homo Sapiens
  XM_001133301
tttctgtagagccggcgttttgccctgttgcccaggagtttttcctttaatgttctcctgctacttactaattcactttgtcaccctgtgagctcataagagcagagagatagcaacaggagctaaaaaaactctaagctgtgaaaaaatattaaatatgaaatcatgatagctattagcttaatttgttttaggcaaattgcaaagtaattttttgggaatcagtgtcccactgcagtgattccatatggggattcctaattcccagtatgtttttaaaataatttgtaaacacctagtacaaacgcatgatatgaaattcaagaggtgggaggatcacctgagcccaggaggttgagacttgcagtgagctgagttcacaccactgcactcgagccttgatgacagaatgagactgtctcaaaaaaaaaaaaaaaaaaaaattgtccttaagtccatgtggacccctgactaggtttgtgccctagacagccttcctctgagggcagttcaggtggtgagactccagctttaaatggcctctagagaaatttcactaacctgccttggtgtttgaccctgtataacccctttcttctggaggtccctttgggtggcagtagatacgggatttggtgtctgacagctctggggacagatcccagctccaaatggcagagtctctacagattacaagccaaatacttagcactatgtgctgatcttcaggaagtcagtctatatttcataacaagtcacatggggataatgaaggaatggcctaaaatgctctcagtaatattcctgagtcatccctcagggctaggcttggtgttaggcatggcggggaagggagcagagctgtgtgcagaggaagatgcagttcttgccttgtcagggtccctgacctgatggcgacccatggtggagtcttcatagtgacagacaccactgtaaaagcagatccaggttgtgcaaccctcaaagcaggtctcctcactcaccgggatagatagactattggccgtacctgcatccaccgcttgccatggtttcgttgtgggtggaggatactttcctgtcccctggctttgggtttgcccacgtggcttgctctggccttggaatgaagcagaaacgaaaggctgccagttccgagcccacgtctgaagtcgccttaggtggttccgcgggccccgtgcgctcccaccttcacccagagggccttctctggtgcagccgctgcttcttcagcctccgcccaaaaggaacggagccccctggccgatccgcaggcctacagggagccacagagcgcagcggctggaccagcgttcaagcccaagcacaggcctgcgagaaccttgttccagccgccgtttaggatggttgattaggacgcgttgcagtggcggtagctcaccaatccagtgcgtgcacccgctcctttattaggctatagagccagtggctcccacagggacctgatacaacagtgcgttaaataaggagcatattgagctctcatgtcgtaagccagtggagaagtccagggctagtgtgggggctccggcgggggctgtggcccccatccgcatggagcctccccatggttcacaggtctcagtcttcggagccttcggccctgcgagcccgaacggtccacagggcggcgccagaccctctttcgaacgccatcctctaaagcctcggctccaaccggttccacttcttcaggctcaggattttcactcttctcgaatgggggtggccctcccccaatcttctgagtcgcaacagcatctccctccctccaggacctcagagccagagctgggcgagaggccctgacctccggggtagggtggaagcgtccctgtgaaggtgcagtcctgcctcccatccccaggcgcggggcctctcccaccctcagcgccctgctcacctccagctgaagatgccagggcacctctgcttcctccctgccctctctgcagtaccgccgagtgtgcataaaagggtttaatataggctttgccgggcgcggggactcccacctgtaatcccagtacgttgagagaccaaggcgggaggatcacttgaggccaggagttcaaaaccagcctgggcaacaaagtgaggcccgtctctgg

SEQ ID NO: 7265 - DNA, 756 bp, Homo Sapiens
  XM_001133357
atgcagccaggaggaacagctgggcctgaagaggcccccatgcgggaggcagaggccgggcctcctcaagtcggcctctccagacccacttgcagcctcccagcgtcctctccgggcccagctcttcctcccggctgcgtctccaggcccgactctggcctcccaacaacgtctttggactcagctcctgcccagctcccagcggccctggtagacccacaacttcctgaagccaagctccccaggcccagctcaggcctcacggtggcctctccaggctcagctcctgccctccgatggcatctgcaggccccaaatggcctccggtcggtgggctcctctaggcccagcttgggcctcccggcggcctctgcaggcccaaaacgtcccgaagttggcctctccaggcccagctccggcctcctggcggcctttgcaggcccaagtcgtcctcaagtcggcctggaattaggcctggaagagcagcaagtcagcctctccgggcccagctccatcctctcggcggcctctccaggtgcaaaacttcctcgagtcagcctctccaggcccagctcctcctgcctcccattggcctctttcagcccagcccagcccagctcatggctctcggcggccttcccaggccccgcttttgacttttggcggcctcttcaggcccagaacttgccctccagtggacctttgcaggcccggcctcggcctcggcctcacagcggactctccacgcccagctag

SEQ ID NO: 7266 - DNA, 2824 bp, Homo Sapiens
  XM_001133393
atggttcgcaaggaatcggcctcggagcccggcagcctcctggcttccctcctgaccaccagtaacccggccgggaaacactggcgaagaccgggggccagtcgccttccctttctgggctgttggcttaaaatacacacaaacacaagtccccaggcggtccgcggccctggtgccctcgccggcatgtgctgcctaccagaccaggttttggaaaatgacgatggtgtcagctgtgatgcatgtttaaaaggaaattttcgaggtcgcagatataagtgtttaatttgctacgattacgatctttgtgcatcttgttatgaaagtggtgcaacaacaacaaggcatacaactgaccacccaatgcagtgcatattaacaagggtagattttgatttatactatggtggggaagctttctctgtagagcagccacagtcttttacttgtccctattgtggaaaaatgggctatacggagacatctcttcaagaacatgttacttctgaacatgcagaaacatcaacagaagtgatttgtccaatatgtgcagcgttacctggaggcgatcctaatcatgtcacggatgactttgcagctcatcttacacttgaacacagagcccctagagatttagatgaatcgagtggtgttcgacatgtacgtagaatgtttcaccctggccggggattaggaggtcctcgtgctcgtagatcaaacatgcactttactagcagttctactggtggactttcttcttctcagagttcatattctccaagcaatagggaagccatggatcctatagctgagcttttatctcagttatcaggagtgagacgttctgcaggaggacagcttaattcctctggcccttccgcttctcagttacaacaactgcagatgcagctgcagctagaacggcagcatgcccaggcagcacggcaacaactggagaccgcacgcaacgcaacccggcgtactaacacaagcagtgtcaccactacaatcacacaatccacagcaacaaccaacatagctaatacagaaagcagtcagcagactctacagaattcccagtttcttttaacaaggttgaatgatcctaaaatgtctgaaacggagcgccagtccatggaaagcgagcgtgcagaccgcagcctgtttgtccaagagctccttctgtccactttagtgcgtgaagagagctcatcctcagatgaggatgatcggggggagatggcagattttggtgctatgggctgtgtagatattatgcctttagatgttgctttagaaaacctaaatttaaaagagagtaataaaggaaatgagcctccaccacctcctctttgatgacatcccaattcgcagacaatgtcctctgtgctgtatttgccaatgaaagtggacaacaactatcttgggtttgtttggtgattgtaatttcaggtctgtcactcttgttacattgtgtacattcaaaaggaagagagaaaatatatatgataatcatttccacttaactaatttttacttctagcaggtaaatgtaggtagcagtgcaggggtgatctctgcttcctgtaccttgacatgcaaaaggctctcctaatactccacattcaaactgaagaggaaaattgaaatctctaatgaagctgctgtgtgtatttatgaatattaatgaataaaaactgcttggatggtttaccttaactactgcatgaggttttttgcagcgtgcatgagttttagtgaccttgttatttaagaagttaaatacaaggagtaaaacttaaaaaaaaaatacaaagcccaaagctttcccaaacattattcaatggttacacgacgaagtagcttttgaataatgtctgcctgaatcacctttctttgtgtgcctcctacgcacaaagccagctctgcagtggaatctggggattatagccgggtgtggcactccgccctgtgtgactgtcctgtcgccctgttagtcatcttgcctgtgtggagctcagcctgtctctttaactcatctgtagaagacacaccagtaaagctactgttggaatctgctgcaggggcctttgtgtgccctaaaaacaaatcctgttcatgtttgtttaaagtttttactttttgtggttgtttaaaattttttcaattgttaaatatgttttattcaggtgtagatgaatttcatttattgactgttcaacagagttaacctgaattatgttgtctttgtttttaaaaatctcacattctcaatcatattttgcattatttatgtatttgctttgtagtttgctgagacagatcagtatcaggggagctttgaggatttgccttcccagatttgtcagtatattacaaccaaattcttaatgctaattttagcaccttttatttattgggttttttctggcataaaaagtaaagccttttaattgaatcatgccacctatatgcctatattattaatcctatgtgtaaaaaaaatgtacagctttttttgggtttgttttggggtttggaagggccgggttattttttatttcctgtttcagtttttgtgcatagactttcacaatagctccaaggcagggacagcgggtttgggggttgggagggcagtttttggaatgtaaatttaggacttttaaaaaggtgcgcacagcttctgataaatttataactagacttaacctaatcatgtctcgttccagttctcttttctctgagcccttttcaaagtctcctctctttctcctgtcatccttttcctttcctgtccgtgtatctccgtttcttcaacatg

SEQ ID NO: 7267 - DNA, 1707 bp, Homo Sapiens
  XM_001133534
cttgaatttggacagtgaaaaggcccttaaaaaggatcgcagtatgtggtagggaagtgatgctgtctgaaggtgacatcctgttctcctctcttctgtcctctccatccttattttggccacctggtttgatcttgctcttctacctagttttttatgggttcctggctgcactcttctcattcacgatgtgggttatgcttcagactctcaacgatgaggttccaaaataccgtgaccagattcctagcccaggactcatggtttttccaaaaccagtgaccgcattggaatatacattcagtaggtctgatccaacttcgtatgcagggtacattgaagaccttaagaagtttctaaaaccatatactttagaagaacagaagaacctcacagtctgtcctgatggagcactttttgaacagaagggtccagtttatgttgcatgtcagtttcctatttcattacttcaagcatgcagtggtatgaatgatcctgattttggctattctcaaggaaacccttgtattcttgtgaaaatgaacagaataattggattaaagcctgaaggagtgccaaggatagattgtgtttcaaagaatgaagatataccaaatgtagcagtttatcctcataatggaatgatagacttaaaatatttcccatattatgggaaaaaactgcatgttgggtatctacagccattggttgctgttcaggtcagctttgctcctaacaacactgggaaagaagtaacagttgagtgcaagattgatggatcagccaacctaaaaagtcaggatgatcgtgacaagtttttgggacgagttatgttcaaaatcacagcacgtgcatagtatgagtaggatatctccacagagtaaatgttgtgttgtctgtcttcattttgtaacagctggaccttccattctagaattatgagaccaccttggagaaaggtgtgtggtacatgacattgggttacatcataacgtgcttccagatcatagtgttcagtgtcctctgaagtaactgcctgttgcctctgctgccctttgaaccagtgtacagtcgccagatagggaccggtgaacacctgattccaaacatgtaggatgggggtcttgtcctctttttatgtggtttaattgccaagtgtctaaagcttaatatgccgtgctatgtaaatattttatggatataacaactgtcatattttgatgtcaacagagttttagggataaaatggtacccggccaacatcaagtgactttatagctgcaagaaatgtggtatgtggagaagttctgtatgtgaggaaggaaaaaaagaaaataaaagtgtgtttgaaaaatattatcttgggttctttgtaaaatttattttttacatgctgaattagcctcgatctttttgattaagagcacaaacttttttttgtaaaacatgtaaaaaaaaaactgggattaatttttagtgttggaactgcctcttattttaggctgtagataaaatagcatttttaggttagccagtgtgactatgcacctaattttttatgagattaaattcataagacttaatttgtacaatagtttgtgaaatatcttgttactgcttttatttagcagactgtggactgtaataaagtatataaattgtgaaatataaaaacttggaacttattcaaagcttcaaagcaaacaa

SEQ ID NO: 7268 - DNA, 750 bp, Homo Sapiens
  XM_001133559
ggcttttccaagggctagggatcttgctgtcctaaggacagctgagcaagggggtcgaggaggagcttgggtggtggaggagaggaaaccgggtaagatgtgtgaagcagtcggctataccaggcacagagaggacccactgggacacaagagcctgcatgtgaagccaggccttgggccaccttgttcctcaaaggggtgcttacttccatggggtcttcaaagggactgtggaaagagaagccttcagcccacacctctgaatgcttttccaccacagcatgccctgtggcctgtatcctgctggtgtggaacagtcagacccctgcagggctgcagagcctctgtactgggcggcatcccagcctgagtgccagagctcagtgggcaggcccccgagcaagtagagaggagggcaccttttggacagaacctgtgggacaagagcgacgtctcatccgttcaggttcctcacaaaatgagagtcaggaagatcagggtgcagacctgatttcccacgaagggctgaaagcagacaaccagagggagagcagcacctgggccaatgaggtagaagacagaagaccacagtgtacttctgccctcaacctcaccccctcccacctacatcctccacaccccctgaccaccttcttcagaaacgtaataggaatcaagatcccccctggcctggttgctatgggaggcacagtggcctgatggagcctgaggcaggtgtgggaagatgtg

SEQ ID NO: 7269 - DNA, 1257 bp, Homo Sapiens
  XM_001133747
ccccactaccaactccatgttactctctctcaccagtggccaccaccatggatacaggccccgaccagtcctacttctccggcaatcactggttcgtcttctcggtgtaccttctcactttcctggtggggctccccctcaacctgctggccctggtggtcttcgtgggcaagctgcagcgccgcccggtggccgtggacgtgctcctgctcaacctgaccgcctcggacctgctcctgctgctgttcctgcctttccgcatggtggaggcagccaatggcatgcactggcccctgcccttcatcctctgcccactctctggattcatcttcttcaccaccatctatctcaccgccctcttcctggcagctgtgagcattgaacgcttcctgagtgtggcccacccactgtggtacaagacccggccgaggctggggcaggcaggtctggtgagtgtggcctgctggctgttggcctctgctcactgcagcgtggtctacgtcatagaattctcaggggacatctcccacagccagggcaccaatgggacctgctacctggagttccggaaggaccagctagccatcctcctgcccgtgcggctggagatggctgtggtcctctttgtggtcccgctgatcatcaccagctactgctacagccgcctggtgtggatcctcggcagagggggcagccaccgccggcagaggagggtggcggggctgttggcggccacgctgctcaacttccttgtctgctttgggccctacaacgtgtcccatgtcgtgggctatatctgcggtgaaagcccggcgtggaggatctacgtgacgcttctcagcaccctgaactcctgtgtcgacccctttgtctactacttctcctcctccgggttccaagccgactttcatgagctgctgaggaggttgtgtgggctctggggccagtggcagcaggagagcagcatggagctgaaggagcagaagggaggggaggagcagagagcggaccgaccagctgaaagaaagaccagtgaacactcacagggctgtggaactggtggccaggtggcctgtgctgaaagctaggtcctccgggggaggagggtgtagctggcgtgtcatcctcagggcgcttcctcgctcacgccaggagggacttggagtggcgagctggggcccgatggggcttgggggcagagtagacatctagcctccctaagggtatgcgcgctaaagcccagctctcgatctcacc

SEQ ID NO: 7270 - DNA, 878 bp, Homo Sapiens
  XM_001133820
atcccacgtcccttggcccctaatcctcgaaaaaccttaggagctcgcccccaccatctcccttccgcccctcctgcctccgtggtccctaactctcctttagccctgctcagcccccaaatactccctatgcccacggggctccccgactcgtcctccccgtcccgggaaggggtggccctcagtacccgcctggctcgccctgccgccaagctcaagtgtcccttcccttcccctcggggcccccgaggccgctgccagcgctggcactgcggggccggctcaccagttggtcatgtccaggaagaaggcgcaaccggcaggattgagctggaagccgagcagcctctggaactcggagatgagcacgtccttgtcggtggtgcccaggcagctgaacttctgcatcagctccgggtccaggtctacgtccatgccctccatggcggggaccggacacccgcttccccgcctcttcacaaccaagccgccgccgcgccgccgggcccggggacctggaggggggccgctgctagctagcttcgcgaccccgctcctttgaggtgaggaaactgaagtcccgggagagacagtggcaaggtcaagtagcaaagtgcactcagccctcccagcaaggagtctgccactcgcgcttgaaggacgtgtttgaagagctgctttcccagtgggatgctgccttaaagtcttgattccctggcactctttcctattactacattttatcggtgctgtttgtgttatgcaacggtagcatcgtgtctccggaagataaaaaaggtctcgatacaaacatccataaccttccacccactccgtcaggaacaacccaatcaaaataaagtcatgagaatttagca

SEQ ID NO: 7271 - DNA, 7580 bp, Homo Sapiens
  XM_001133842
atgctcaacgaatgggtcaggcgcgccggagtcgatgccggcgtacctgagggagtgacaagcagcgaatcgcagcgggccagcgaattcatgtccgcctcgatgagagcgcatcatggcaccgggtccgacactggcggcagcaactccctaactgccgtgacgtcagcaagccgcaagcggttgtcgagaggcttgacctccatcaagcgcaaggagtgggcacggctgcgccgtcaacttcgtcaggttcagcaggagcgcgacaccctggcaaggctacggactggtttgccagtcgcagcgatgcgacttcgacaaggtcttcggcctcgtaactactccagacccccagcgtatagtggggtgcccagtgcaagctacagcggcccagggcccggtatgggtatcagtgccaacaaccagatgcatggacaagggccaagccagccatgtggtgctgtgcccctgggacgaatgccatcagctgggatgcagaacagaccatttcctggaaatatgagcagcatgacccccagttctcctggcatgtctcagcagggagggccaggaatggggccgccaatgccaactgtgaaccgtaaggcacaggaggcagccgcagcagtgatgcaggctgctgcgaactcagcacaaagcaggcaaggcagtttccccggcatgaaccagagtggacttatggcttccagctctccctacagccagcccatgaacaacagctctagcctgatgaacacgcaggcgccgccctacagcatggcgcccgccatggtgaacagctcggcagcatctgtgggtcttgcagatatgatgtctcctggtgaatccaaactgcccctgcctctcaaagcagacggcaaagaagaaggcactccacagcccgagagcaagtcaaaggatagctacagctctcagggtatttctcagcccccaaccccaggcaacctgccagtcccttccccaatgtcccccagctctgctagcatctcctcatttcatggagatgaaagtgatagcattagcagcccaggctggccaaagactccatcaagccctaagtccagctcctccaccactactggggagaagatcacgaaggtgtacgagctggggaatgagccagagagaaagctctgggtcgaccgatacctcaccttcatggaagagagaggctctcctgtctcaagtctgcctgccgtgggcaagaagcccctggacctgttccgactctacgtctgcgtcaaagagatcgggggtttggcccaggttaataaaaacaagaagtggcgtgagctggcaaccaacctaaacgttggcacctcaagcagtgcagcgagctccctgaaaaagcagtatattcagtacctgtttgcctttgagtgcaagatcgaacgtggggaggagcccccgccggaagtcttcagcaccggggacaccaaaaagcagcccaagctccagccgccatctcctgctaactcgggatccttgcaaggcccacagaccccccagtcaactggcagcaattccatggcagaggttccaggtgacctgaagccacctaccccagcctccacccctcacggccagatgactccaatgcaaggtggaagaagcagtacaatcagtgtgcacgacccattctcagatgtgagtgattcatccttcccgaaacggaactccatgactccaaacgccccctaccagcagggcatgagcatgcccgatgtgatgggcaggatgccctatgagcccaacaaggacccctttgggggaatgagaaaagtgcctggaagcagcgagccctttatgacgcaaggacagatgcccaacagcagcatgcaggacatgtacaaccaaagtccctccggagcaatgtctaacctgggcatggggcagcgccagcagtttccctatggagccagttacgaccgaaggcatgaaccttatgggcagcagtatccaggccaaggccctccctcgggacagccgccgtatggagggcaccagcccggcctgtacccacagcagccgaattacaaacgccatatggacggcatgtacgggcccccagccaagcgccacgagggcgacatgtacaacatgcagtacagcagccagcagcaggagatgtacaaccagtatggaggctcctactcgggcccggaccgcaggcccatccagggccagtacccgtatccctacagcagggagaggatgcagggcccggggcagatccagacacacggaatcccgcctcagatgatgggcggcccgctgcagtcgtcctccagtgaggggcctcagcagaatatgtgggcagcacgcaatgatatgccttatccctaccagaacaggcagggccctggcggccctacacaggcgcccccttacccaggcatgaaccgcacagacgatatgatggtacccgatcagaggataaatcatgagagccagtggccttctcacgtcagccagcgtcagccttatatgtcgtcctcagcctccatgcagcccatcacacgcccaccacagccgtcctaccagacgccaccgtcactgccaaatcacatctccagggcgcccagcccagcgtccttccagcgctccctggagaaccgcatgtctccaagcaagtctccttttctgccgtctatgaagatgcagaaggtcatgcccacggtccccacatcccaggtcaccgggccaccaccccaaccacccccaatcagaagggagatcacctttcctcctggctcagtagaagcatcacaaccagtcttgaaacaaaggcgaaagattacctccaaagatatcgttactcctgaggcgtggcgtgtgatgatgtcccttaaatcaggtcttttggctgagagtacgtgggctttggacactattaatattcttctgtatgatgacagcactgttgctactttcaatctctcccagttgtctggatttctcgaacttttagtcgagtactttagaaaatgcctgattgacatttttggaattcttatggaatatgaagtgggagaccccagccaaaaagcacttgatcacaacgcagcaaggaaggatgacagccagtccttggcagacgattctgggaaagaggaggaagatgctgaatgtattgatgacgacgaggaagacgaggaggatgaggaggaagacagcgagaagacagaaagcgatgaaaagagcagcatcgctctgactgccccggacgccgctgcagacccaaaggagaagcccaagcaagccagtaagttcgacaagctgccaataaagatagtcaaaaagaacaacctgtttgttgttgaccgatctgacaagttggggcgtgtgcaggagttcaatagtggccttctgcactggcagctcggcgggggtgacaccaccgagcacattcagactcactttgagagcaagatggaaattcctcctcgcaggcgcccacctccccccttaagctccgcaggtagaaagaaagagcaagaaggcaaaggcgactctgaagagcagcaagagaaaagcatcatagcaaccatcgatgacgtcctctctgctcggccaggggcattgcctgaagacgcaaaccctgggccccagaccgaaagcagtaagtttccctttggtatccagcaagccaaaagtcaccggaacatcaagctgctggaggacgagcccaggagccgagacgagactcctctgtgtaccatcgcgcactggcaggactcgctggctaagcgatgcatctgtgtgtccaatattgtccgtagcttgtcattcgtgcctggcaatgatgccgaaatgtccaaacatccaggcctggtgctgatcctggggaagctgattcttcttcaccacgagcatccagagagaaagcgagcaccgcagacctatgagaaagaggaggatgaggacaagggggtggcctgcagcaaagatgagtggtggtgggactgcctcgaggtcttgagggataacacgttggtcacgttggccaacatttccgggcagctagacttgtctgcttacacggaaagcatctgcttgccaattttggatggcttgctgcactggatggtgtgcccgtctgcagaggcacaagatccctttccaactgtgggacccaactcggtcctgtcgcctcagagacttgtgctggagaccctctgtaaactcagtatccaggacaataatgtggacctgatcttggccactcctccatttagtcgtcaggagaaattctatgctacattagttaggtacgttggggatcgcaaaaacccagtctgtcgagaaatgtccatggcgcttttatcgaaccttgcccaaggggacgcactagcagcaagggccatagctgtgcagaaaggaagcattggaaacttgataagcttcctagaggatggggtcacgatggcccagtaccagcagagccagcacaacctcatgcacatgcagcccccgcccctggaaccacctagcgtagacatgatgtgcagggcggccaaggctttgctagccatggccagagtggacgaaaaccgctcggaattccttttgcacgagggccggttgctggatatctcgatatcagctgtcctgaactctctggttgcatctgtcatctgtgatgtactgtttcagattgggcagttatgacataagtgagaaggcaagcatgtgtgagtgaagattagagggtcacatataactggctgttttctgttcttgtttatccagcgtaggaagaaggaaaagaaaatctttgctcctctgccccattcactatttaccaattgggaattaaagaaataattaatttgaacagttatgaaattaatatttgctgtctgtgtgtataagtacatcctttggggttttttttttctcttttttttaaccaaagttgctgtctagtgcattcaaaggtcactttttgttcttcacagatctttttaatgttctttcccatgttgtattgcatttttgggggaagcaaattgactttaaagaaaaaagttgtggcaaaagatgctaagatgcgaaaatttcaccacactgagtcaaaaaggtgaaaaattatccatttcctatgcgttttactcctcagagaatgaaaaaaactgcatcccatcacccaaagttctgtgcaatagaaatttctacagatacaggtataggggctcaaggaggtatgtcggtcagtagtcaaaactatgaaatgatactggtttctccacaggaatatggttccattaggctgggagcaaaaacaatgttttttaagattgagaatacatacctgacaacgatccggaaactgctcctcaccactcccgtcatgcctgctgtcggcgtttgaccttccacgtgacagttcttcacaattcctttcatcattttttaaatattttttttactgcctatgggctgtgatgtatatagaagttgtacattaaacataccctcatttttttcttttcttttttttttttttttttagtacaaagttttagtttctttttcatgatgtggtaactacgaagtgatggtagatttaaataattttttatttttattttatatattttttcattagggccatatctccaaaaaaagaaagaaaaaatacaaaaaacaaaaacaaaaaaaaaagagggtaatgtacaagtttctgtatgtataaagtcatgctcgatttcaggagagcagctgatcacaatttgcttcatgaatcaaggtgtggaaatggttatatatggattgatttagaaaatggttaccagtacagtcaaaaaagagaaaatgaaaaaaatacaactaaaaggaagaaacacaacttcaaagatttttcagtgatgagaatccacatttgtatttcaagataatgtagtttaaaaaaaaaaaaaagaaaaaaacttgatgtaaattcctccttttcctctggcttaatgaatatcatttattcagtataaaatctttatatgttccacatgttaagaataaatgtacattaaatcttgttaagcactgtgatgggtgttcttgaatactgttctagtttccttaaagtggtttcctagtaatcaagttatttacaagaaataggggaatgcagcagtgtattcacattataaaaccctacatttggaagagacctttaggggttacctactttagagtggggagcaacagtttgattttctcaaattacttagctaattagtctttctttgaagcaattaactctaacgacattgaggtatgatcattttcagtatttatgggaggtggctgctgacccacttgaggtgagatctcagaagcttaactggcctgaaaatgtaacattctgccttttactaactccatcttagtttaatcaaagttcaatctattccttgtttcttctgtgtgcctcagagttattttgcatttagtttactccaccgtgtataatatttatactgtgcaatgttaaaaaagaatctgttatattgtatgtggtgtacatagtgcaaagtgatgatttctatttcagggcatattatggttctcatattccttcctacctggtgcacagtagctttttaatactagtcacttctaatttaaactttctcttcctgggtcattgactgttactgtgtaataatcgatttctttgaaactgctgcataattatgctgttagtggacctctacctcttctcttccctctcccaatcacagtatactcagaatccccagcccctcgcatacattgtgtcggttcacattactcacagtaatatatggaagagttagacaagaacatgcagttacagtcattgtgagacgtgactctccagtgtcacgaggaaaaaaatcatcttttctgcaaacagtctctcatctgtcaactcccacattactgagtcaaacagtcttcttacataacaatgcaaccaaatatatgttgaattaaagacccatttataattctgctttaaatacatctgcttgctaagaacagatttcagtgctccaagcttcaaatatggagatttgtaagagggaattcaatattattctaatttctctcttacagagtacaaataaaaggtgtatacaaactccgaacatatccagtattccaattcctttgtcaatcagaagagtaaaataattaacaaaagactgttgttatggtttgcattgtaaccgatacgcagagtctgaccgttgggcaacaagtttttctatcctgatgcgcaacacagtctctagagactaatccaggaagactttagcctcctttccatattctcacccccgaatcaagatttacagaagcccacgaagaatttacagcctgcttgagatcatcttgcctataaactgagttattgctttgtcctaaaaattagtcggtttttttttttctatgaggcttttcagaaatttacaggatgcccagactttacatgtgtaccaaaaaaaaaaaaaagataaaaaataaaggtgcaaagaaagtttagtattttggaatggtgctataaagttgaa

SEQ ID NO: 7272 - DNA, 447 bp, Homo Sapiens
  XM_001133884
atgtatcccttttgcttttcagtgtcttctcggaaaaaaccagccttgaaggctacaagtgacgagaaagattctgttttgtatatagccagagaaaaaaaggatggagaaaaatctaggacaggtaattttgaaaacagatttaatgtcatgttcagtccagataggagaactaaggagacccctggtgtagcaactattttcctaaggaagacggatttgtcttctcagaaacaaccagcattgaaggctatctgtgacaaggaagattctgttccgaatatggccacggaaaaaaaggatgaacaaatatctgggacagtgtcttctcagaaacaaccagccttgaaggctacaagtgacaagaaagattctgtttcgaatatacccacagaaataaaggatggacaacaatctggaacaggtaattttgcaaaacacatttaa

SEQ ID NO: 7273 - DNA, 6546 bp, Homo Sapiens
  XM_001134215
ataggcagtgctccattctctgtgcctcaggacctggaagttaaccactttcgggatgaaattcttgccttgacgtctgtctccctcaacagtaaacagagggtgcagcactaatgaaaggtttccccaggcgtccctcccttgacaagtaatgtgagtgcccaggctgactgctgcctttgtccctgcaggagatgagtgtgggctatgcaaatgggatccgggtgatgagcatgacgcacacaggagagccaggattcatgctctacatccccatagagtacgccctgcatgtatacaatgaagtgatgagtgttggccagaaatacggaatccggaatgctgggtattacgctcttcgcagtctccgaattgagaagttttttgccttctggggtcaggatataaataacctcaccacgcccctggaatgtggacgagagtctcgggtgaaattagagaagggcatggatttcattggtcgcgacgccctcctgcagcagaagcagaatggagtgtataaacgcctcaccatgttcatcctggacgaccatgattcagacctagacctttggccttggtggggagagcccatttaccggaatgggcagtatgttggcaagaccaccagcagtgcctacagctacagcctggagcgccacgtttgcctgggctttgtgcacaatttttctgaggacacgggggaagagcaagtggtgacagcagatttcatcaaccggggagagtatgagattgacatcgcgggataccgcttccaggccaaggccaagctctaccctgtcgcctccctcttcacccagaagcgccgaaaggatgacatggagctgagtgacttacatgggaagtgatgccaccagggcagcctcacctcctccccatcatcttgtcctagagtgggcgtcaccttggagcttctcttccttccgcctctgttcctcttctggagcctttgcctcccatctcttatctccttgatataattttgaacttgacctactttaaacttttttgctctgcagccttccttgcccttccacctcctcctcctaatattcactctgggctcttcttcccttcccacccctcactcagcttctcgtggtggcaggaggtatgtctgacaggacagaagcaagctccactgtggacatgagtgatggtgacagctgctttcaaattctgcatctcaaggcagggcaagccggggtggtgcaggtctcagggcacgagtccctctcccttgggttccattttcttggagcagcctattagttctggtggggttgccgtgtgtcggatgcaaccctgaggggcagctcgtgcctgcagcccggcagctcgttctcctgttctgctgtgctgtgggctggcactcgatacctctggcaagaggatgatcatctacctcactgataagaggcatcgcatggacgttctctggtctgtagtggagacaagcagttaacctagcaccatcctcatcctccctgcagaagccattagcagacctttgggccagggcagcctccctataattttcttcatctcttgctaatctctataataaggttgctttttctttcttagttgagtaaacaagtaagccacagtgtttgaaagggaaaaaccatattgccttgtgtgttgcttttcccagtcaaaagggtctgaccttagaaagtccccaccagtgatgctgagtgttctgctatggaaacaatgctgcttttctctcagctgtccaaagttcagccgttcctccttccccttctcccagtgcgtttgactttgtcaggtcagcctcacttgtccctttcacagttggcccataaagtcatgtttctctccctttagaatagggaggggaagggatcaggtgtgttgtcctgggcctttcaaccttgcgggctgtgctgagttccagagagctgccggaattccaggtttgactctccagcacagagcagagctacacagaggtgacccacgttagtccactgagagttctgagtccaaagggtgtacgttgcataaggctagagaccgcttttcctcctttccccccaggctctttgtttccctccacccacccttccatatcctctggagcaggagacaatgtgggtgcccagaagtgccctgcgctttcaggcagtgtctctgttttcccaaggtgaaacttagatatcatggactgttgtccagcctcaatgcttcattttccccttgcatatcaactgccctaatctgactttttttaagtgcaaataaactgctataagacattttggttagtaaaactctagcctttggcgtgttggtatcttggaagcattagctctgataggtctataagtgtattaagggacatccttccatttcattagagcagcttaaaatgctcaggtgtctgccttctctggtgtttctttgggatctctgtttacccacttacgctggctccttctagacatttcttgccacttccccaactagaccactcctagtgattactgactttagtgcctaaacctttttggaaggttctggttggcttgttagaggagcatatgattagaattctgtttgggggtctagttgtcttggagcaagtatgtacttaactagccgagagatgctgcctctaggcagagaggaggagaggtgttgccggctggagggccaaccagtgaacaccagctgtgaaggccttgggagaggaggaacaggcccttgggcagatgcaggcattaccagcagggagcagacttacctccgaagatggagacaggtgactgagagctgcaggcctcctctgctcttccaaacacgtagcatttgcacccctccaaagccatctttgtaaaggaaaacgtatttgtaattgaatccagaagaatttagttacacatagacataactcttcaaccttaactatggcaatacatttgtgctttaactgttacatagcagtatcaccacttaccaggatccaaatcgaaataataaaagctgtctccatagtttaaaatcgaatagtgccatcatcacagtatattagtcaaatagaagcttcatcagaaatgtatcccacatagagttttaagacttggattctcttctgcccttgttaatctccaactaattactacagattgacacgtttttaattagctgtcctttgtaagaagtcaggaaatctgatgctgtgtccaaaattatgcactgtttgttgaagtagaaccagaaatcctgacctcctgttaaatgacatcagtttccccctctgagcaacagactgcttgtcttgctaggagaggaggatggggggctgagcactcaggctgtccattgaaaccccttgtccatgaatagggtcatactcctaagactgatggggtgttgatcttctaggacatcacttgtttattcagtgccccaaacacagatttctcttctagcactttagagttgatccttgaagtctctcctggttcattcaaatacaagctgtgtgagtctggtggttttctgtgattggtctaatgtgagctctttgaacagacagatctgacagtgaatgactctcccctgcttctggcataactgctttgcctctgtctagtgtccaagcatcttagctgttcaagaggagagggcagcataacttcctgaccaccggtgtcagatatcagagcattctggactcctgagaggcagtggcctcttgagtgaacaggggaggccagtagatgccccagatccagagccgtggctgcaaatccagcaggaataaggagggacaaccacagcctcctcatccatgtgtcatttccaagggtttgccttgtgtctcagctcattctgggcagcacgtttgtcttctgtccctagagatttgaaggattttggactcttgtgaatgggtgactggacttggctttacagagttgggtgcttttttctctctgcaattacctgtcatagcattttgtgctcaccacgaaggatggtctctgccttctcttgtcggtgtatgccatctgaacctaggaacacaaagtatattggcctcaaacggagacccagggttgccagttttccgtgggccttcccctcccttgaaatgtctttaattacctccccttcatcgtcaggccacgtgtgacttctgttcttagcactgccagggtcattgacttccatctaagcttgcatcaggaagatgttccttctgtgatcattggtactgaagccagaaaagctctcattcaggaactctgaagagcaaaaagggacaaacactaactgctgagctgggccatttgatctcctttcaccttgcattgctgtcacagcaccttgtatgatggcaggacaggctccagcagagagaactgcacagtgaccactgtatttttcacgctcttccagggatccctgtcccccgacattgaagagatctcattcaggccagagacacagagaccacatagcccagtgattaaaccccggtttcactctggccccaggagtggagcctggccactcctgtttggttctcactgggaggcccactggccttggatcatctcctcatgcacacccggagttttacctgcttgcttgctttcctggactgctgtttgcaagaaagtaactaaaacatgaaaagtaaacctccagcttccacagtatattacctgccgttgcatgcatttgaaagttagcctcctcccttgccaccgtcttggtggcagtagcgatgcaagaatgatgggagctttccgagagcgttcagtgtttcactgaagacaggacccatagccttcatttctggctctgtgtctcctctggcatatggacacatttcctggcatttgcctgagtctacaccactttttgagaacctgaaatagaagggaatcttctgtggcccacagtctccatattggcactagaagactggcctggcggaggaatttgcgttggcttgctttcaggggttagctacaagattcagctttatatctctgttgcttcttggccagtgtagtcaataagggtcttctttaacatctaagatagaggtttggttggccgggcgtggtcgcttactcctgtaatcccagcactttgggaggcccagtgaggtgggagaattgcttgaacccaggaggcagaggttgcagtgagctgagattgcaccactgcactccagcctgggtaacagagtgagactcttgtctcaaaaaaaaaaaaaaaaaaaaaaatctaagatagaggtttggtcaacagtgcttaataataaataagaacctcctgccattctaattttcctgctgcaccccatcccccacacacccctcacgaacattgatataagcagtattaacacagtataaagaatgttcaccttgcatatgtcatttcaggcacatggattcaggagaagcacagttgagtggaagaaatggtagacttgtgaggcttgccccaggccttgtgtacacgcaataagtggtgagccatgggtctctccgtcagcgcctccctccccgccaccacttcaggccaacaatttaaggtgctgagttgtaaggctcctccattgtcagtacagggctcgcctttgtagccctgatcactaccagtacacttttcaagacaactgagtatttttgtatgcctttgccttccctttgtccatgaaacatgaagagttgtttatggttcttgacttctctgagcagagtgtctgcatctcttggagagttacacatttcttcatgagccatttttctcattcttagatgcacctgtttttatcctttgcagaccatcttctgccttcttattttcctgtctgtcaaagacagaaattacaggagatagggagggttttttagcatctctttcaaaagatgtatgtcagaatttcctttgcacaccaagaactggagcttagagccccactattctctaagccaggttctagtgccttacactccagaatgtcagatggtgggtgcagattggaagaaagagaaaagttcatctcggtgtgtgggttcccatccgccccacatagcctctccttcttcggaacaatgggcgtggggtagaaagctctttcagtgaagggtgttctagcagctcagttaacactttactctccagtcaacacttgggacatataaaaatgccattgtaactactgtagagtcctgtgactcatcgtttgtgtttgtcaatttgcagttcagcttagcccttccctgttcctgtgtagttacaatctggccctgaagacatccgaggcacttcagtaagtgggatcttttctagagatcctgggtgactttgggtgcacagggtgaccgagcatttctgcccctgtgaatgtggcactaacactgtgcactgtctccaccaagcaaggtttccactgagtttcttctcatgttactgggtttgtaaatgaataaacacattttaactactcttgcacggctgcttgtgaaa

SEQ ID NO: 7274 - DNA, 1091 bp, Homo Sapiens
  XM_001134346
gagccgatgcccgattccgcgcccgccatggccgacaaaatggacatgtctctggacgacatcattaaactgaaccggagccagcgaggcggccggggcgggggccggaaccgcgccgggccggctcccagggcggcccggcggtgggcgcaggccccgcgcgagtgaatcgaggcggcgggcccatccggaatccgcggccatcgccggcgcggccggcggaggcggcaggaaccgaccggcgccctacagcaggccaaaacaacttcccgacaagtggcagcacgatcttttcgacagtggcttcggcggtggtgccggcgtggagacaggtgggaaactgctggtgtccaatctggattttggagtctcagacgccgatattcaggaactctttgctgaatttggaacgctgaagaaggcggctgtgcactatgatcgctctggtcgcagcttaggaacagcagacgtgcactttgagcggaaggcagatgccctgaaggccatgaagcagtacaacggcgtccctctggatggccgccccatgaacattcagcttgtcacgtcacagattgacgcacagcggaggcctgcacagagcgtaaacagaggtggcatgactagaaaccgtggcgctggaggttttggtggtggtggaggcacccggagaggcacccgcggaggcgcccgtggaagaggcagaggtgccggcaggaattcaaagcagcagctttcggcagaggagctggatgcccagctggacgcctataatgcgagaatggacaccagttaaacagaccagcaaatccgcgtgcggaacaggacccaggcgtctcctcttgctccctggttggggggcggtggctggggctgtgcggccaatgatggatttgtttcttttatgttttaaaataggatttaaaaactcatgtaaaggttttttttttttctttttttttttttttaattctgaaacagacctgttttgtaccgagttatttttgggataaattttactggttgctgttgtggagaaggtggcgtttccaccttttccataataaaatagaaatgtgtgtagaactggaact

SEQ ID NO: 7275 - DNA, 822 bp, Homo Sapiens
  XM_001134398
gcagcgtcccaggggatgcggcgcgcccccgactgggtgcagcggcaggccgcccccggcagcaagtgccgggtgccatggcaacggcgggaatttcccagtcggggcggccggaagcagccccagccgggctcgcggcagcgaaagcaaaatccgatctctctcccgggggagcaaaatggacgaaaggcgaccccccaggcaggggcgctgggtgccttgggaatccgaggaatcccttctctttgccagtcggaggggactagatggagccgaaggggccggagatgggccgagcgctgccccccgggggtcctcggcgccggacgcagcttacgagcgcaacgcagcaggctccattcccggccgccgccgctcagcccattacgcaaacctggcgggtccaaccaaccccgctctgccgccgctgctggaacccatgaggcgtgcttgcaggcttcgggcactacgcggggctggaaataccacgcactgccccttcgcctagacccccgctcgggccacgcgggttctgccctcaaagctggtagctgccccagacttgggggtggggggaggggaaggggcgaggctggcgccccctcccgcttttggctcccgcgttcgttgcagcagctgttgccaaatgaaccccggaatgcggacgtgcaaaccctccaccccacccccagccacacacgtcgcggtcagagaactgggaagggggcgcggggtccgaggttctggaaaagcaagaactcacctgcaaacaggcagtcctcagctctggacttctggatcacgacgtcgatatccttctga

SEQ ID NO: 7276 - DNA, 552 bp, Homo Sapiens
  XM_001134411
acacgccggtcaggattcgcgacccgacatggagcgtccccgcagtccccaatgctcggccccggcctctgcctcagcttcggttaccctggcgcagctcctgcagctggtccagcagggccaggaactcccgggcctggagaaacgccacatcgcggcgatccacggcgaacccacagcgtcccggctgccgcggaggcccaagccctgggaggccgcggctttggctgagtcccttccccctccgaccctcaggataggaacggccccggcggagcctggcttggttgaggcagcgactgcgccttcttcatggcatacagtgggcccctgaggttccaggtcctttgcggcggcgatctggagggcgtggctacaggacccgggatgccattcagttactcatcttttatgctttcgtcctgacctgtctcaactagacttgctcctgcaaccaccatgggggttttgcatttacatttgtggaccatgttacagttaagaaaaatcctgtttcagtccttatatgtaataaaatgttttatgatgtaa

SEQ ID NO: 7277 - DNA, 1723 bp, Homo Sapiens
  XM_001134421
atggggatcattccttcagcattcactctcagtattcgtgtggacacctccatctacagcctcgtggcggacgggacctgttaggacacggccattgtgggcaacaaggacccaccttccatctgggccgccgtcccagggaaaaccttcctcaacatcacgccagctgaggttggtgtcctggttggcaaagactggtcaagctttgtcatgaatgggctgacactggggggccagaaatatactgtggtcctggactcactgctgcaggatggggaattgaccacggatcttcgtatgaagagcatcggtggagcccccaccttcaacgtcattgtcaccatgactgccaagacgctaggcctgctgatgggcaaagaaggtatccatggcaatttcatcagcaagtaatgttatgaaatggcctcccaccttcagcgttcccagtactgacctgctttgttccttccactccaccgctccccacagctttgcctgcctttccttcacatacacacaccattttaatttcaggagtcattaccccacacaccttattgctgccaaaaccacatgggctgggggccagggatagatggacagacaccttcccccacccatacccctcctgtgtgtggctggaaaacttttttgttttgatggatttcttatgaataaaaaagattctactaaaaaaaatgaataactgtacatatgtgggcatattgtttgaatctgtattctttcactttgatatatttatgaatacttacaccattactactgttttaaaattactgtagctttaaaatcaggtttgaaatctagcagagtaagtcctccaacttattgcttcttcaagaccgacttgcttattctaggttctttgattttcaaatacattttgaaactagctttcaaatttctctaaaatctcctactagaaatattaatcagaattgtgttgatgtaatatgctaacaaaattgagtcttccaatcaataaacatgatatatatttatttagccttaatttttctcaccaattgcttttaggggcctcgtacctgcttcattgcatgtattgttaagcatgtaatgattctggttattaatctctattatgttttattgaatttcattttctagctgctaattgctagtatggagaaattaagatgatgaaatcaactttataaaggcataatttcggtacaacagactgcaccactttaaaatgtgtaattcaatgcacgtttacaaatggatacactaacggaactactgccacaaccaagatagaggaaattccctatgccccaaagtttcttgtacccctttgcagttcatcagcctttcaaccctcagccccaaggagccactgtcacttcaggtccgtttgcatttttaaccattttctataaatgaaatgatacctgtgttcttttgtgtctgccttctttcatgcatcaatgtaattttaaaatccatctgtaatgtctcgtaaatactgagtagtattccttcgtgtggctataccatgtatgtttgtactttcacttattattggacatttctatcattccgcgtttgggctattatgaagaaactatcatgagcatccatacgtggcaggccaggtctcactaacacaggcctccctaacaactgtttcagtaccgactgagtggttcaattaaatattaagaggaaaaaaaaaaaa

SEQ ID NO: 7278 - DNA, 3121 bp, Homo Sapiens
  XM_001134465
atgccggaagctttcctgccacgcaagctttccgagcatgctaactcgccccaagcagctcccatcccgcagcatccactgcagccgctgaggagaccaggatcccaggactgctcaggcctccgcgcccccggcctcgccccgcccgcgcgcgctcgcgcgccgagggccacgcccgtgacgtcggcggagcgcggtagggggcggggcgcgggccggagtgggcggggcgagcaggcgcgactgaatcgggcgccgcaaagagccgcgccacccgccgccgctacccccttcaaggtctcgctgcagcccccgggagccgccggcgccgcgcccgagcccgagaccggtgagtgccagcccgccgcggccgccgagcaccgggaagccgccgctgtccccgccgccaagatgcccgccttctcctcctgcttcgaggtggtgtccggggccgccgcgcccgcctccgccgccgccggcccgcccggcgcgtcctgcaagccgccgctgccgccgcactacacgtccaccgcacagatcaccgtgcgggccctgggcgccgacaggctcctgctgcacgggcccgatcccgttcccggcgccgcgggctccgccgctgccccgcgcggccgctgcctcctgctcgccccggcgcccgcagccccggtcccgcgcggcggggctcctcggcctggctcctggaggagctgctgcggcccgactgccccgagcccgcgggcttggacgcgacacgggaggggcccgatcggaacttccgactgagcgagcaccgccaggccctggccgccgccaagcaccgaggccccgcggcgaccccggggagccccgatcccggccccggtccgtggggcgaagagcacttggcggagaggggccccaggggctgggagaggggcggcgatcgctgcgacgcgcccggtggggacgcggcgcggaggcccgacccagaggccgaggcaccccccgccgggagcatcgaggccgccccgagtagtgcggcggagccggtgatcgtctccaggtcggatcccagagacgagaagctggccctatacctggccgaggtggagaagcaggacaagtatctgcggcagaggaataagtaccgattccacatcattccagacggcaactgcctctaccgagctgtcagcaagacggtgtatggggaccagagcctgcaccgggagttgagggagcagacggtgcactacatcgccgaccatctcgaccacttcagccccctgattgagggcgacgtgggggagtttatcatcgctgctgcccaagacggggcatgggccgggtacccggagttgctggccatggggcagatgctgaatgtgaatatccatttaactactggagggaggctggagagtcccacggtgtctaccatgattcattatttgggcccagaggattccctgaggcctagtatttggctcagttggctcagtaacggacactatgatgctgtatttgatcactcctatcctaacccagagtacgacaactggtgcaaacaaactcaagtgcaaaggaaacgcgacgaagaacttgccaaatctatggccatatccttgtctaaaatgtatattgaacaaaatgcatgctcttgaaatgtctcaaaaccttacaccctgggaataattgcatatataacttgtgtttggagaatcacatgaactttaatcagggtaatagcactttcaaacttgctagtagattttactgtaggtgtaatgccttaatcatctttttgaatgttttctcagagctggaggttgctgggcacctaaatgatgtttcatgatagctttgggtgattttactgctatttataatttgctgtataaagtgagcattacttaatttgcaagctgatttctcacagtgtaaatttgttcattcctggtagtctattttctataaaaatgtatttttgcacaacatttttaaaaactggtgtaccttcatctatgacgtgttccattttgacaaacagctttcaggcgtaaatccagagaagtgctttatatgaaatgtattattttgaacagagtttgtgatttggtagttattttatgttgttgaaatttgaatttcacaattcttagataattatttcaaatggatattgatgcattcttgttaccagatgtttggcccattccattttgatgaaacagagctgttgttttggaagtcattatttttctagaaatggcgaatcttttaaagaaaattacttaatggaaggttgtgggaaggtgtttttttgtgttttttttttggtttttgttttgtttttcctcttttaagggatagtagcaggtcttacttgaatgaaagtctgatatttgctgatggcagaatgattattctgtaccctggttgatgtgtagagtagattgtctggtgctctcagttgtttttatttacatttgtcacgttgttgtaagagaatgttaacatggtataaaactctgtgacaagataagcctcctgctttatataacttcttgaatccagctaagagatttataaactaatggcataaatgtctggagccaaccttggcagttatagcaggagaacactgtcttaatatttctttacattctttcaaaaggcaaaataggattgccctgtattgatgtagaaatgtctgtaaacagagcttgtatggtttgctgggtcaaacaatgtttccaacttaaaatcaatctcattgccactttaactacttttagtcatatttattaagtaatgcagtttgtactttttttattttgtaacattttgtgatttttttgtacaaaactgtatttgtacaatagagcaattcccagctgatggaatgaatgaataaaatgcaaaattatacttttacaatgcctttttggatagagtggtttttaaattgtgatgtttgtaggaaactttcttgcatgtatgcatgtacacaattttttttttccataaagatgccacagcaatagagaggtttcctaaattatcacatgaagaggataggctaatcatgagtaatttcaaaggataagtctgaataaaatataatttaaaagtggagtaa

SEQ ID NO: 7279 - DNA, 5545 bp, Homo Sapiens
  XM_035299
atggcatcgtggcgtcgcgacggcgtgtgcgtgtcgcgcttcctagtgccgtttatagggtcccggcacttccgctgtcgggttagaagcggcgcggtcatggcggagcgcggacagcagcctcctcccgcgaaacggctttgctgccggccgggcggcggcggcggcggcgggggcccgcgggcgggtggcgcggcggcggcggcggcgtgcgggggcggcgcggcgctggggttgctgccgccgggcaagacccagagccccgagtcgctgctggacatcgcggcgcgcagggtggcggagaagtggccgttccagcgcgtggaggagcgctttgagcgcatcccggagccggtgcagcgccgcatagtctattggtccttcccccgcagcgagcgggagatctgcatgtactcgtccttcaacaccggcggcggcgccgcgggcggccccggcgacgacagcggtggcggcggcggcgcgggcggcggcggcggcggcggctcctcgtcttccccggccgcaacctcggcggccgcaacctcggccgccgccgccgctgccgccgccgccgccgccgccgccgccgccgcgggggccggggccccgtcggtgggggctgccggggcggcggacggcggcgacgagacgcggctgcctttccgccggggcatcgcgctgttggaaagcggctgcgtagacaacgtcctgcaagtcggtttccacttgagcggcacagtgacagaacctgcaatacaatcggagccagaaactgtttgcaacgtggccatcagctttgatcgttgcaagattacctcagtgacctgcagctgtggaaacaaggacatattttattgtgcccatgttgtggcactgtctttataccgcatccgcaagccagatcaggtcaaactgcatcttcctatttcagagactctctttcaaatgaatagagaccaactgcaaaagtttgtacagtatttgatcacagtgcaccacacagaagttttgccaactgctcaaaaattagcagatgaaattctttcccaaaattcagaaatcaaccaagttcatggtgctcctgatccaacagcaggtgctagtatagatgatgaaaactgctggcacttagatgaagagcaggttcaagaacaggttaaactgttcctttcccagggcgggtaccacggatcagggaagcagcttaatttgctctttgcaaaggtgcgggagatgttaaagatgagggactccaatggggcccgcatgttgaccttgataacagagcaattcatggctgaccctcgcctgtcactttggcggcaacaaggcactgcaatgactgacaaatacaggcagctctgggatgagctgggtgctctgtggatgtgtatagttttaaacccccactgcaagttggagcaaaaggccagttggctaaaacagctgaagaaatggaatagtgttgatgtctgtccatgggaagatggaaatcatggcagtgaattacccaacttaaccaatgctctgcctcagggtgcaaatgccaaccaagattcatcgaacaggccacatcggacagtgttcacccgagccatcgaggcatgcgatctccactggcaggatagccacttgcagcacattatcagcagtgacctatacaccaactactgttaccatgacgacactgaaaactccctcttcgactcccgcgggtggcccctctggcatgaacatgttcctacagcctgtgcaagagtggacgcattacgttctcatgggtaccccagagaagcactgagactagcaatagctattgttaatacattaagacgacagcagcagaaacagttggaaatgttccgaacccaaaaaaaagagctaccccataaaaacataacctcgataaccaatctggagggctgggttggacatcccctggaccctgtgggcactctcttcagtagccttatggaagcctgccgcattgatgatgagaacctctctgggttctcagattttacagagaatatgggacagtgcaagtctctggaataccagcatctacctgcacacaaattcttagaagaaggggaatcctatttaacgctggctgtggaagtagccctgatagggctaggacagcagcgtatcatgcctgatgggctgtacacacaagagaaagtttgccggaatgaggagcagctcatttctaagcttcaggaaattgaattggatgacacactggtgaaaatttttcgcaagcaagcagtcttcctattagaagccggaccatatagtggtttaggtgaaataatccatcgggagagcgttccaatgcacacatttgccaagtatctcttcacctctctcctacctcacgatgctgaattggcatacaaaattgcactgagagcaatgcggttactagtattggaatctactgctccatcaggagacctcacccgcccacaccacattgcatcagttgttcccaaccgctaccctcgctggttcactctaagccacattgagtcccagcagtgtgagctggcatccaccatgctaactgcagccaaaggcgatgttcggaggctggaaacagtattagaatccatccagaaaaacattcactcctcatcacacatcttcaagcttgcccaagatgcatttaaaatagcaactctcatggacagtttgccagacatcactcttttgaaagtgtctctggagctgggcctgcaggttatgcgaatgacactgtcaaccttaaattggcgacggcgggagatggtgaggtggctggtaacgtgtgctactgaagtcggggtttatgccctggacagcatcatgcagacctggtttacactctttactcccaccgaggccacaagtatagttgcaactaccgtgatgtccaacagcaccatcgtccgcctccacctggactgccaccagcaggaaaagctggccagcagcgcccggacacttgcactgcagtgtgccatgaaggatccacagaactgtgccctctctgcgctaaccctttgtgaaaaggatcacatagcttttgagacggcgtaccaaattgttctcgacgctgctacgactggcatgagctatacacagctctttacaatagcacggtacatggagcaccgcgggtaccccatgagggcctacaagctggccaccctggccatgacccatctcaacctgagctacaatcaggacacacaccctgccattaatgatgttttgtgggcctgtgcgcttagccactcccttggtaaaaatgagcttgcagctataatacctctggtggtcaagagtgtcaagtgtgcaacggtactgtcagacattttgcgcagatgcactctgaccactcctggcatggtgggacttcatgggaggaggaactctggtaagctcatgtcactggacaaagcccccttgaggcaactcttggatgccacgatcggggcctacatcaacacaacgcactcacggctcacacacatcagtcctcggcactatagtgagtttatagagttcctcagcaaagcccgagagaccttcttaatggcgcatgatggacacattcagtttacacagtttattgacaacctgaaacaaatctacaaaggcaaaaagaaactgatgatgttggttcgggagaggtttggttgatagatcttgtatgaatggggtggggggtggggatgggagggatggtttgtttttacttgagcctgcctttgtaccctttttaacttaaagaacagagccacaccggtattatatgtgtatagttatattgcgtttgcagactaaattgtcatgttgtgaaagtttgtgtgttttttattttttccctatttctttctttcctttattttattattttttttaattttttttttctggttttgtatgagagagaggttaaaaaggtttggtttacactgagtatatgttgtcaagtggcaaaagtccacatagctctcctgttttctgtatacgttcacagcctcaaaaaaaataattgaaatggctttaaaaaccaaacaaaacacctccatcctgtgataagtacctcgaatggattcagctttactcctttgtaactcatctttacattttcagcatatttaaacaaaccaacaaaatgaaatactaatagtaaaaaggctgacccatgtggctttgcagtgctgttcgtccagaagcatggcacacgatgcttgtgcatgtggaaacttagcgactgtcaacatacattctcagggatttatccaaaaaaattaaaaaaagaatgagagcatttattgtactgtatatatattatagtatatgtctgaatattgaaaatataacattaactaatttataaaaaatattctatgtaatgcaaaatacttgaagctgcagtagcttggttttaaacaaaaacaaaaaaaaaactgagagaaaacctatcagaaggactaaaagtacgccttgcttcagggttggctcaggtggtgaacttcatgctgggcatctatgcagagccaccttttggattgcatggttggactgagatctattgggagaaattatatatgtatatatatttatacaacttatgtatacatatatatatgtatacacacagacacacacacacaccaccaacaaccaccactacaccacacatgcttataacaggcactagaataaagagggacaacaaaatacacagccagagcagcaagccttagcattaagaatatacaatatgccggaattggggttcgtgcctcctagcctaggaaacttaaaagaaatatccttttgacacaaaacacaaaatgttttccaaaacaattgacataatgatacattacgcctttgcagtgagctaataataagctaacctttgtgcacaaataacattatatatattatatatctattctgcataggtattttgactttgtgcaggacagaaagttgtgtaggtatgactgttctacttttcagttttctttttttttaatatattttattttctctagaaattactcaaacaaaagcagccttctatcttgccttgtcttaatgctttaaaataaccaaactggagatctaactaccaaactgttcattatattattaaataccaactttggttacagtatagtgtctttactttagctgatggttctgtaaccttgtgctttttaaagcaatttttatgttttggtgcaaaagttgtccagtgtctcttgttcccttcactagagaacatgcttagaggtatgtttgtaggtatttttgtttagaagaactatttcatgcgctccattttatttattataataggtaaaaagaaaaaaaaaggttgtaattcatcacccatgtaaacatgctcatgaagttgaaagtaattaagatttgatacactgatatcaatttatttatgtaactaaatcactgttttataaacttgttaatgatcaacaatttttgttttgattaaaattagttttttgaaagttga

SEQ ID NO: 7280 - DNA, 8531 bp, Homo Sapiens
  XM_037523
atgtgcggctactgggagccgagcctccgccgccagccgcctcccgggcagcagcagcagcagcggcggcggcagcggcagcagctccgggcccgggaggccggcgcccggcggggatgtaagcgcggctcggggagggagaggccgcggccggcagccgggcggcccaagcccccggccccggccctggcccgagcgggcgagcgggcgggcgggcggcggcgccgccaggccctgccgccagcctcgcgccagagccgggccgagctagcggaagcggccgccgccgccgccgcggcggagacgacaacaacttgctggttttcaggttgggttaacggcatggagaacagtcaccccccccaccaccaccaccagcagcccccgccgcagcccggcccttcgggcgagaggaggaaccaccattggagaagttacaagttgatgattgacccggctctgaaaaaggggcatcataaactgtaccgctacgatgggcagcatttcagcctggcgatgtccagcaaccgcccggtggaaattgtcgaagatccccgggtcgtcgggatctggaccaaaaacaaggagctggagctgtcggtgcccaaattcaagatcgatgagttctacgtgggcccggtgcctccgaagcaggtgacatttgccaagctgaatgataacatccgtgaaaacttcctgagggacatgtgcaagaagtatggggaggtggaggaggtggagattttgtacaaccccaagaccaagaagcacctgggcatcgccaaggtggtctttgccacggtccggggagccaaggatgccgttcagcacttgcacagcacttccgtcatgggcaacattatccacgtggagctggacaccaaaggggaaacccgaatgcggttctatgaactgttggtcactggccgatacaccccccagaccctcccagtgggcgagctggacgctgtctctccaatcgtgaatgagaccctgcagctgtcagatgccctgaagcgcctcaaggatggaggcctgtctgcaggctgtggctccggctcctcctctgtcacccccaatagcggtgggacacccttctcccaggacacagcttattccagctgccgcctggacacacccaactcctatggacagggcaccccgctcacaccgcgcctgggcacccctttctcacaggactccagctactccagccgccagcccacaccctcatacctcttcagccaggaccctgcagtgaccttcaaggcccggcgccacgagagcaagttcacggacgcctacaaccgccgccacgaacatcattatgtacacaattctcccgcggtcactgcggtggccggggccacagccgctttccggggttcctcggacctcccgttcggagcagtcggcggcactgggggcagcagcggtcccccgttcaaggctcaaccacaggattcagccacatttgcccacactccaccacccgcccaagcaacccctgctcctggattcaagtctgctttctctccgtatcagaccccagtggcccacttccctccacccccggaagagcccaccgccacagccgcttttggggcccgcgacagtggggagttccggagggcaccggcgcccccacccctgccacctgctgagcctctggccaaggagaagccaggcacgccacccggcccgccgccccccgacaccaacagcatggagctgggcggccggcccaccttcggctggagtcctgagccctgtgacagccctggcacgcccacgctggagtcgtcccctgcagggccagagaaaccccacgacagcctggactcgcgcatcgagatgctgctgaaggagcagcgcaccaagctgctcttcctgagggagccggactcggacaccgagctgcagatggagggcagccccatctcctcctcctcctcccagctctccccactggccccctttggcaccaactcccagccaggcttccggggccccacgcccccctcgtcacgcccctccagcaccggcctggaggatatcagcccaacacccctcccagactccgacgaggacgaggagctcgacctgggccttgggcctcggcctccacctgagccaggccccccggaccctgctgggcttctgagccagacagctgaggtggccttggacctggttggagacagaaccccgacctcagagaagatggatgagggccagcagtcctcaggcgaggacatggagatctcggatgacgagatgccctcggcccccatcaccagcgctgactgccccaagcccatggtggtgaccccaggagcggcagccgtggcagccccttctgtgctagccccaaccctgccgctgcccccgccacctggcttccccccgctgccccccccaccaccaccacccccaccgcagcctggcttccccatgcccccaccgctgcccccaccgccgcccccaccccctccagcccaccctgctgtgacagtgcccccaccacccttgccagcgccgcctggagtcccgcccccacccatcctgccaccactgcccccctttccgccgggcctgttccctgtgatgcaggtggacatgagccacgtgctgggtggccagtggggcggcatgcccatgtccttccagatgcaaacgcaggtgctcagccggctgatgacgggccagggcgcctgcccctacccgcccttcatggccgctgcggccgccgctgcctcagctgggctccagtttgtcaacctgccgccctaccggggccccttctccctgagcaactccggcccaggccgcgggcagcactggccaccactgcccaagtttgacccgtcagtgcctccaccaggctacatgccacgccaggaggacccacacaaagccacggtggatggcgtcctgctggtggtcctcaaagaactcaaggccatcatgaagcgtgacctgaaccgcaagatggtggaagtggtggctttccgggcctttgacgagtggtgggacaagaaggagcggatggccaaggcctcgctgaccccggtgaagtcgggcgagcacaaggacgaggacaggccgaagcccaaggaccgcatcgcctcgtgcctgctggagtcatggggcaagggcgagggcctgggctacgagggcctgggcctgggcattgggctgcgtggggccattcgcctgccctccttcaaggtcaagaggaaggagccaccagacaccacctcatctggcgaccagaagcggctgcggccctcgacctctgtggatgaggaagatgaagagtccgagcgagagcgagaccgggatatggcagacaccccctgtgagctcgccaagcgggaccccaagggcgtgggtgtgcggcggcggccggcgcggcctctggagctggacagtggtggggaggaggacgagaaggagtcattgtcggaggaacaggagagcaccgaggaggaagaggaggcggaggaggaggaggaggaggaagatgacgacgatgacgacagtgatgaccgggacgagtctgagaacgatgacgaggacacagccctgtcagaggcgagtgagaaggacgaaggggactcggatgaagaggagacagtgagcattgtaacctccaaggccgaagccacgtcgtccagtgagagttccgagtcttctgagtttgagtcaagctccgagtcctcgccctcatcctcggaggatgaggaggaggtagtggccagggaagaggaggaagaagaggaggaggaggagatggtggccgaggaaagcatggcttctgcaggccctgaggactttgagcaggacggggaggaagcggctctggccccgggggcacctgcagtggactcgttgggcatggaagaggaggtggacatcgagactgaggctgtggcccctgaggagcggccctccatgctggacgagccccccttgcctgtgggtgttgaagagccagcggactccagggagccgcctgaggaaccaggcctgagccaggaaggggccatgttgctgtctccagagccccctgccaaggaggtggaggctcgacccccattgtcccctgagcgagctccagaacatgacctggaagtggagccggagccccctatgatgctccccttgccgctgcaaccaccattgccgcccccacgaccaccccggccacccagcccaccgccggagcctgagaccacagatgcctcacacccatctgtccctccggagccccttgccgaggaccaccccccgcatactccaggcctctgtggcagcctggccaagtcgcagagcacagagacggtgccagccacaccaggcggggagcccccgctatcagggggcagcagtggcctgtccctgagctctccgcaagtgcccggcagccccttctcctacccagccccgtcccctagcttgagcagtgggggcctccctcggacacctggccgggacttcagcttcacacccaccttctccgagcccagcgggcccttgctcctgcccgtctgcccactccccactggccgacgcgatgaacgctccgggcccctggcctccccggtgctcctggagacgggcctgcccctccctctgccccttcccctgcccttgcccttggcattgcccgccgtcttgcgggcccaggctcgtgcgcccaccccgctgccacccctgctgcccgcccccctggcctcttgccctcccccaatgaagaggaagccgggccggccccggcgatccccaccatctatgctctccttggatgggcccttggtccgaccaccagcaggggccgcccttggaagggaactcctgctcctgccgggccagccacagacccccgtcttccccagcacccatgacccccggacggtgaccctggacttccggaacgcggggatcccagcccctccaccaccccttcccccccagccacccccacccccacctcccccacctgtagagcccaccaagctgccctttaaggagctagacaaccagtggccctccgaggccattcctccgggcccccgtgggcgcgatgaggtcactgaggaatacatggagttggccaagagccgggggccgtggcgccggccacctaagaagcgccatgaggacctggtgccacctgcgggctcgcccgaactctcgccaccccagcccctcttccggccccgctcggagtttgaggagatgaccatcctgtatgacatctggaacggtggcatcgatgaggaggacatccgcttcctgtgtgtcacctacgagcgactgctacagcaggacaatggcatggactggcttaacgacacgctctgggtctaccatccctccaccagcctctcttcagctaagaagaagaaacgggacgatggcatccgcgagcacgtgacgggctgtgcccgcagtgagggcttctacaccatcgacaagaaggacaagctcagatacctcaacagcagccgtgccagcaccgatgagccccccgcagacacccagggcatgagcatcccagcacagccccacgcctccacccgggcaggctcggagcggcgttcggagcagcgccgcctgctgtcctccttcactggcagctgtgacagtgacctgctcaagttcaaccagctcaagttccggaagaaaaagctcaagttctgcaagagccacattcacgactggggcttgttcgccatggagcccatcgcggctgacgagatggtcatcgagtacgtgggccagaatatccgtcaggtgatcgcagacatgcgggagaagcgttatgaggacgagggcatcgggagcagctacatgttccgggtggaccatgacaccatcatcgacgccaccaagtgcggcaacttcgcgcgcttcatcaaccacagctgcaaccccaactgctatgccaaggtgatcacggtggagtcacagaagaagatagtcatctactcgaagcagcacattaacgtcaatgaggagattacctatgactataagttccccatcgaggacgtcaagatcccctgcctctgtggctccgagaactgccgggggaccctcaactaggccccggcaccagactcaaaggatgtcagccgtagccctgggactcccgagcgtggagcccctggccccggggcccggccccccgcgcccgcccccatttcaggtgctgtcctctacccagcggccattcagggcctggcgccccacactaccccctggagcccctggctccggcccctccgcgggaaagggcttctctgtcgttcagcccacgtctctctcattttaacaaacgcccctttcaggatttctgtttaactccagcatcagcttctctctctccgtctctcctcccctctctctcttctctgtctcttctctctcccaccatcaccctcggcctcttcctgtgaatgctgctacgttgttttgtcttctctatttttttcctcgttgtgagaaaagacatttaaccgttgaaatgtgaaggtggaatcagagaggggccccgcgggggtctgcagaggcctcagtgtggctgtgcgtggcccgtgtcctggaagccacccggacctggacgcagggccaggtgctgtgggaaggatggaggcccccacggccttgacctcagaacactacgccctgaaagcgcccctcactgcccgtgggcacagtgaggagaccccacacctttccccacccgagctgcagcctgttccttccccagaggcctggggcaccactgacccggtggaccctgatggagctaagctgtcccaggcaggggtctccgctctgggctttccctgccacctcacaccccagcaccccctaaaccttgggttcaatgtttactttctcattcggatgccagcaacgcgggagcctctcggaggccccagtgcaggtgaggggcgctgagaacgcgggcagccactctcttctgcccttgccttcgccctgggtgggacagggctcccaagggcaggcgggtcccccagtcccgccattacgggttgtcagaccgtctgcgtgtggcattttttggcttataagcttcacccactcacccccaacccacaccccacatccccctgccggcagcccctcaacctaagaaggccagagcatatttattttcggagggagcagattacttctcccagagaaaggaaaatcttggaaaagatttaaaaacacaaatctaagccttgacggtttttttttcccttttgacccccttcccatctcttcagaatttattcccatggcttttttttttcttgtgcgtgtataaaatcaaaaggaaggggaaaaaggtttttgaagttcagaaccaacttctgtatatagaggctgccgcaaaggactttctcttgggaacattgtttcttgtagaaacatgcgggaagacattttttgctcatttctttgtacttccaaaaaaaaaggaaaaaaaagacaaaagcaagtccccccgtaccccagaaagcagaggaggcgtgtaaataatttctggaaagtgactgttgtgacccggagtcctcatcaagatgagcgcgctccatgagggagctgctcccaccctgcggacgcaggcggccggagcctctggtatctcagcttgtgtcaagcttgttatcatgtaaattctgtacaaagaattgttatttttctcttttttgttgttggtggttttgttgtgtgttttttgttgttttttttttattcctttcccccaggccctctctatttgagactgtgcccgccggtttcaagatcaaggaaattggtggcaacaagacacagatggggtacctgggcacagcggcgaacttctcttccgtttgcggttttctgcctaattgtgcaactgaggaaataatttatttttcacatgaggaaatgcgtagcttgtagagacggctgattcaagttacatgtacagcctccaaagggctgtctccattctgtccccttcccataaaagaagtgggggtgttcgagaagaccagggaagggacccttgcctcacccctccccctggcctcaccttgctcccagccatcgtgcccagtgttaacctcggctggccttcactaaggggactagacctccctctccccaggagccccagccccagagtggtttgcaataatcaagatatgtgtcgagtcatttttctttcaactccctcatttttcattgaacaaatctctgcttttcaagagttgggggtttctgctattttttgctttctctccctccccctgcaaagatgagaaccaatgagttttagggatgtttgtgcgggtagactccatcatccatatgtaacttgttttgaagagaagtgtttccgttgtgtgtcttgatgtaaatatttgttcatatttttgtgaattcaatactatgtaccattgtattatagtaacttttataaagcaaaccataaatatactgacttttcttacaga

SEQ ID NO: 7281 - DNA, 7309 bp, Homo Sapiens
  XM_042978
atggagactctggatagccagagggtccaggaccgcctgctggcagccccaggatgcagctccccttctggccaacaggaactcttttccagtcatgtgatgcaggaagagagcgcaaatgatatggaatgtgagcagctgccagcagagatactgcgacaagtgaccgttcaccgagaccctatatatggctttggcttcgtggctggcagtgagaggcctgtggtggttcgatctgtgaggccaggaggcccctctgagaacaagctcctggctggtgaccagattgtggctattaatgaggaagacgtgagtgaagccccgagggagagactcatagaacttatcaggagcgctaaggaattcatcgttcttacagttctgcacactcatcagtcccccaaatctgctttcatcagtgctgcgaagaaggccaagttgaggtccaatcctgtgaaggttcgattttctgagcaggtggcagttggagaaacagatgcaaaaatgatgaagaaggaagctctcctcctcatccctaatgtcctgaaggttttcttagaaaatgggcagatcaagtcattcacatttgatggtcggaccactgttaaggatgtgatgttgacattacaggaccgcctttccctgaggttcattgagcactttgctcttgtccttgagtatgccgggccagaacagaatcacaagtttctgcttcttcaggacaagcaacccctggcttatgtggtacagcggacacactatcatggaatgaaatgcctcttccgaataagcttctttcccaaagaccctgtggagctgctgcgtcgggatcctgctgcttttgagtacctatacatccagagtcggaatgatgttattcgagaacgctttggaatggatcccaagccagagatgcttttgggccttgctgcgctccacatctatatcactgtctcagccactcgacctagtcagaagatctcgctcaagaatgtggagaaggagtggggcctggaaccctttcttcccccctccctcctgcaggtcatcaaagagaagaacctccggaaatctctctctcagcaactgaaggctcaccaaacacatccttcctgcggcaccaagggctctgcaattcaggcaaagctccagtatctacgaattctgaatgaacttcctaccttcacgggcgttttgttcaacactgtaggcctggatgagaagcagtcggccaccacgctcctggtgggaccccgtcatggcatcagccatgttattgacctcaaaaccaacctcaccactgtgctgtccgagttcagcaagatcagcaagatccagctgttccgggagaaccagggcgtggcccgggtggagaccagcatcatggatgccaagcctctggtgctgttgatggagtggcctgaagccaccaactttgcctgcctgatcgcggggtactgccgcctcttgctggattccaggaagatggtcttctccaggcctgccagccagccacttccacctccaatgatcaaggcagattacatgcacagcgcccaccgccctgtcactgggggccacctggggaaaaaggagagtagttatgtgggcagcgtgggcaccagccccaggaaatcgagccgctgcacgcccccacctgccgactctgagcttgtcagcttctgctacctccatatgcgggaacaaaggaaggagcaggaaagccggacagatgtcaacgagaacctaatcttctttgaggagaccaggccccgaaccaagtctgaccccacatccaaaagctctggccaaggttatgaggtagtccctgatgactttgatgcagctagcctagaccacgagccttgtgccagcagggcccggtcctacaccttggacaattcccttggggctgaagccctgaatttctactgtgactcttgcaaagccaaacttcaggagcagctgggccctcgcaaaggtgggaagcctggctcctctcgtgacaatatagtagatttgatgtccctcccaccacctgggagtgaggaggaggaggaggaggaagatgagacaacttctctgttgccagccattgctgccccaccccctggtttccgagacaacagctctgatgaggatgaccccaagcgccgggctgtccagagccaggaacaaggacgccacctgcgtgggcttctgtacgatgagattccagtgacattgattgacagtgtgcagacccggacagttcgagatcatgcccaggagctagatgatgccctggtgtccactctgcaggctctagaagccctggctgcatccgaggatggaccacacccaccacccccacagactgcaggtctgattgtgctggccacaatcactcctgaatcatcgctggactcaggtcatgaaaccaactcttcagagctcacagacatgtcagagatgatgtcggccatgaagcagcaccagaacaccacctacttcctggcccagcacctcaacaaggacagcctccttgcccgcaaggacctgcccttccggatccagagctgtgcagcccaggccgttcttacggccccttactctcttgggcgcccggatcccaacccatctctccaacccattgccacaggccagagtcctggcccccctggcgctcggaggaagctgccccagtcagagggccaggtacagggagaacgaacatactccttggcagtgcacccagcactgtccccacagcttagtgaacagaagaatctgagtctgctgtccccagttcctgaggacaaagggcctggccacactagggcaggcctagaaatgtcactgagggcagccacatcatccctcagtgaagagcaggtctctgagctgagggacaacctgcccaaggaggtcaggttgagccccaagcttatcctcgacccaaagagcagtgtgacccctgccatcatctcggccgccctacagcaagtggttcacaataagagtctagtcactgctggtggggctttggggaacccccccagcaggggtgagagaaggctggaggccagcatggggaggccagaggttagcatgatgagcagcagtgccagtaagaatctgaagttcaaaattagccccagtgctccagagacctcatggaattctcaacatcagctgggtgcagaggtctcttccagccccagagcacccacaggcagccgggctgacagcctgcacctctcccaacaagaggacagtctgcctgttcaaaatttccctcccaaaagctatcttttgcgaacaagccgagagtcagtgggcaagcaagctacaggggaggtggcaggcaaaggcgggccagtgggtggtaagcccaccctgcagaagcagggcaccatctccagccaaggggagaaggcgcagctggagagcacacccaaaagaagcaagctcgaagagaccagcctggttccccgagctacctaccccatggctctgcagagccccagctgccagtcaagaagccacagccccagctgccagcctcatggccacagccccagcagccagtctcgaggtcagagccccagctgccaacctcgaggccagagcccactgaggtctcaggctgccagccggcaggtgagcaccatgccctctaggaagcttgaaacaactctcaatggagcccactcgacctctgaaggccctgccaaacccaagtcatcccgaggtcctttccggctacgcaatttattctctgccaccttcccaacccgccagaagaaggagacagatgagcggcaggcccaactgcagaaggtaaagcagtatgaactggagttccttgaggaacttctaaagccaccaagccagggggagctgccaggcaccgagtacctgcaacctccagcacctggccgctgcagctgccagctccgcagcagccctgtgcagcaggggcctggcatgtcccgtgagcagaggcgcagctgtgactgcaagcgcatctgccgggggggccggccacaagccacccagacaccagtgcccagcctccgggggagggaaagggacagagtcctccctagccagaggcagccagaggctggcccaggcgtgagcctcagcagccccatcaatgtccagcgcattcgttctaccagcctggagtcccgagagtgccgatcggaccctgagagtggtgtttcgtgcctgaccacgtgtgcctcggggggcgagtgtctgggagctcccaattacaggaaactgatgcgccgctacagtatcagtgagctggaccagggtgacagggcctcgctgacctcggatgtctacccacatcctcccctgggcatgctgcccagggaggccaaggaggtagaggcaagcctccccatagccttgggtcccaaaagcaggtctctggagtcaccgacgctgggagacccctcctacgtccaggttgccccagagaccaaaggccccagacagatggccgtgttctcactgcccgaggaggtgtaccggaagcctgccgagctagacgaggacagtgagagcagcaagtgctgctccatccgctactgcttctactaccgcaagtgtgacatggcagatgatgccagtgatggcaaggatgagctctcctactctatccccatgaagatcctgcctggcatgaagctggacgagcaggtggtgcctgtggtgagcaggaccctgcaggtgctggatgctgctacctgcagcagcagcagccctgaggcctcccgcactcaggagattgacctccgtgtgtccaccttcgaggggagcctggccaagatcaatgccctgcgggcccatgcctatggcctccctgatggcttcctggctgcccggctggacaccaacgagctgctgacagtcctgcggcagtgtgtggccagccccgaggcccgtgcccccaagccctatgtgtctcagatctccgagtataagcttgagctagctctcaagttcaaggagctccgggcctcctgccgccgtgtggccaatgtggacaagagcccaactcacatgctggcagccatcacgggcagcttccaggtgctgagcagcctcattgagaccttcgtgcggctggtgttcattgtgcgctccgaggcccagcgccaagagctgctggccaaggtagaagaggtggtgaggaactacaccttcctgctgcgtgcagctgaggagtccacagcccgtaaccttaaccagcagcagcagcaacaacaacagcagcagcagcaacaacaacagcagcagcaacaacaacagcagcagcagcagcagcaggtggcagcagctgcaggggcagccacagagcatccaccaggctccccaacttcggcgactgttatgagcacattcacccactccttaaaaacccttattaagtagggcatctgcccacacctgtcccccttccccaaccatggccccaggtttgagctttgtggtccttgcatcttgtggtgagtgtgtgtgtgtctgctgggccagtcagggtccaagagcccatcagtctccggggagtggaaactctcttgattgaggctctctcttaagggctgcaggcttagctgccgccctgggtgtcctcaccccttccctggcctctgggcctcactgtgagggcaaaggcccctcttcactctgctcacagcagagctgtattttatctcttctctggggctgagaggtgacatcaggctcacttcctgctcaatccgtgttgggcgctgggggagccagggcctgaagcaagcggaccctcaggctttgagctcctcgtggcatcggctcccctgctgggagcagtggcagtagcagcaggccacattgccgtgccgaggggagagggcgctcagtccagatgtccccatccaccttgggctcacactcacctggtagatgccaccctgagggcctgtgcctgggtgagatgtctgcagaaaacagccacactaggctgtttgcagcggcccaactggccggcagcctggtgagccctcacctccaggtccagtagctccacaccagccatccccaaagtgccctgcccctcactgatgggcagggcagctcagtccactagggagcaagcatctgggatcaccccactcattttgggtaaggtacctgatgaaaacgtctgcctggggagacccagtgcaggcctaggagcccgcctagcccggcccagcccagctcaggggctgttgctgcaggcatgaggcttctctctcaacatctctctaccagacagactgtccttgggagtttgacttagctgtggatcggggaggggggtggggggaggggggaaaggggtaggggtggggggtgttgatgactatatcttaaacttctggaagctagcgtgatatgttaatcctgagtatatgcttttggctgtgtattgaccctgtggatttgtctctctaagaaaagaagctgagcgccttacccggtgcagtcctgcacctttctccctctctggagccatctggaagggaattcacactgtttaacatccaccttgacacacacctcctattgccaccaccgctgccaccaccaccgccaccaccgctgccaaccctccccccacgccccccacccccgcaaccttcctgggagtgaagacacggagtccctaccaactgtcccactgtagggaacaaagaaagccaatgtttcttctgtatagattgcttctcgtccgcctctccatatctccccatttcccacacccttgtgccctgtgtctgcctctgtttcatcactgtgtcagaggcccatgtgaaatctttcattctgatgtgagttttataaagatgtacactgtgcttaatccctgcccatccttggtagcccctagtgcaataaagtctccctgagtggtgagttctcccggcaaggaggaggggagtttcttctgcagaatccagcccctcacttccttgcttctcctcccccaggaccaagttgttgaatgggccagagatgcagccagtggggaatccttttcccctcagccactgcaagctggagtgctgatatggtcttctttttctcccaacttcgccactcagcccctgcctgtgtcattccaccgccatccttcacctctccctcagcctcatggagaggaaacattttctaatgtctgtatatagtatatatactacataaaatatataaattatatatatactaatttatgtcttgtttttcaaacaagaatgattaaatctattcatcttactatccc

SEQ ID NO: 7282 - DNA, 1426 bp, Homo Sapiens
  XM_053966
atggccccccagagagcggggccgggtctagggaagccctcttccaagaagtcccgtgccctgagaggagggccaggagtccccagggccagacagcgaagccccagagctgctgcggagctgaacaccgaggtccccaagccctccgcaaaggacgtggagatcctggagcaagagagcgaagtcctcgagccatcagtcgagcaggacgcagagagccccgggctgtccacagctgcgggctttgagagtcctgagccaggcagagacgaccctgggccgtccgaagcgcaaagggcggaggtccaggggcagcatccccctccaggccctaagacctcctcctccaggtcaggctcggaagccccccacctgcgttttccgccgtgccccgaggctccccagcgtcccccggaggagcggttcatggagacgcccatcgagcgcgaaatccgccgcagctgcgaacgcgaggagagcctgcgccggagccggggcctgagcccgggccgcgcaggccgtgaactcgtcgagctgcgcgtgcggccggtgctcaacctgccgggtcctggccccgcgctcccgcgcgccctggagcgggcgcgggcgggcgcgcagatgcagcgggacatcgagcgggaggcccaccggcaggcggcgctggcgcgccccgcggtccccgagccgcgcgcccggtcgccgccgcagccgctgggcgaactcaagcgcttcttcgaggccgcggcggggagcggctcctcggcgggggcgggggacggcgcgggcccgcagaggctgccagagcctgggggacggccgcgctcggccgtgcagggcgggtgccgggtgctgggcagcgccccgccgcctttcactccgtcactgctggagcaggaggtgcgcgccgtgcgcgagcgcgagcaggaactgcagcgccagcggcgcagcgtctatggcaccgcggagttcaaggagcctacgccgagcctcaccgcgagcaggggcgacggaaagttggtggtgatctggcccccccgcagaaaggtctcggagaacggcctggagcaggaggagcgcaaaccttgaggtttgaaaaggctgggacccccggccggaagtaacgtacgcgtcagaggaacagggcggggggcgtctagcattaggcctggagaagggtcggctctctgcattggggaagatgaaatcgacttgcctttgtgaaattgaccagccccctctataaaacttacagtcccccattgggaaactgaccaccacccacaactccgccagtgaaactgcccagcccttctctgcctaattgcaaactgaactaccctctcccttgactgttaagagggccggagttaccgcctcgattgccccactccccccacccccaataaagcctcttctttcagggcac

SEQ ID NO: 7283 - DNA, 333 bp, Homo Sapiens
  XM_060417
atggctctgcgctaccctatggccatgggcctcaacaagggccacaaggtgaccaagaacgtgagcaatcccaggcacagctgccaccgcaggtgcctgaccaaacacaccaagtttgtgcaggacatgatccgagaggtgtgtggctttgccccttacgagtgtcacaccatggagttacagaaggtctccaaggccatggagttactgaagacctccaagtttatcaagaaaagggtgggggccaggatgcatatccatgccaagaggaagcgggaggagctgagcaatgtcctggctgccatgaagaaagccactgccaagaaagactga

SEQ ID NO: 7284 - DNA, 491 bp, Homo Sapiens
  XM_065899
cacaagatggcaccaaaagcgaagaaggaagctcctgcccctcctaaagctgaagccaaagcgaatgctttaaaggccaagaaggcagtgtcgaaaggtgtccacagccacacaaaaaacaagatccacatgtcacccaccttccggaggcccaagacactgcgactccggaggcagcccaaatatcctcggaagagcgcccccaggagaaacaagcttgaccactatgctatcatcaagtttccgctgaccactgagttcaccatgaagaagacagaagaaaacaacactcttgtgttcattgtggatgttaaagccaccaccaagaaccagatcaaacaggctgggaagaagctctatgacattgatgtggccaaagtcaacaccccgattcggcctgatggagagaagaaggcatatgttcgactggctcctaattacaatgctttagatgttgccaacaaaattgggatcatctaaactgagtccag

SEQ ID NO: 7285 - DNA, 471 bp, Homo Sapiens
  XM_069734
atgctagaaacaggatatttagggcactttaaaaaaagtaatagtgctgaagaggttgtttatgagtgcaccaaccagccacctctgtccctttcccggatgatcccgaaaatgaagcttcctggccaggaaaacaaaacggccgtggttgtgggaaccataacagatgacgtgtgggttcaggaggtgcccaaactgaaggtgtgtgcactgggcgtgaccagccgggcccgcagccacatcttcagggtggggggcaagaacctcactttcgaccagctggccctggactcccccaaggtctgcggcaccgtcctgctctcaggtcctcgcaagggtcgagaggtgtactggcatttcgacaaggccctgggaaccccacacagccacaccaaaccctacgtccgctccaagggccggaagttcgagtatgccagaggccaaggggccagccaaggctacaaaaactaa

SEQ ID NO: 7286 - DNA, 1755 bp, Homo Sapiens
  XM_117451
tgagcacaggcctctgatgtcatttcctgacctgcctccccctccccgcccgacccgcgggtgcccgagatctgactcaccgtccccctccgggcttagccggcggaggtggggcgggtgccgccgaggtagccacgcagcccctgtgcgcctccggcccggcccagcgacctcctctcgggcctgccgttacccggtcccctcctgccaccacccgctacccggccaccccgagtccgcctggggtggccgaacgtatggagctgggctccagggtgcacggggatggggggtgaggagcggggcgttctccctcccagcaccccccagctgactctgtgcccggagggggtgtgtgagccggaacctccagcattcttggggatacgaacttccaacgctgggcagcctcttaaggcttctaggaattcgcatccccagcgccccagccagcagatcggttgcgagagggaccgttcgggtccgcggggccgggaatggaggtgggagggcggggccgaggcggcggccgcctgcggactggagacccgggaggacggacgcggacgcgggctgctcgtcttttacggcccttcaacgcccaccacgacccactcctcttggagaccccgggcgacggtggggctcttgggcattctgagactgcgcttggtggagaccccgggcgacggtggagctcttgggcattctgagactgcgcttggtggagccccctactggccagactggatttctcagcctgcgactcagccccaggctacacgaaagaagccagacctggcttttactgcctcctgaggccttcgtcttgttcacactgagtgtccagtccctccaaatccggctacactctactggcaaggagcacctgggccatgttttagagatcatccgaggactaaccccaaaagtttatgaagagaaagcagaggccgagctgaagagatggacccgggtcacacccaggtaaaggcaggatctaaactgaaactggtgtcagatctggttgccttgcacccctgatatcaggtgaagcaacactgggcaggatagagcagagtgaggtcagagtgtgaagatccagcctgatgcccaaactgacgcctcttcattctcccctgctccatctgtaaacgtcacggttaatccatctactttattgcattatatagagaaataaatgaaatgtcatagctgtatgcgctatatgactcagtattattattcaaattccagttctgcccagaatgaaaattctgacctggttacactaaggcgttttcccccatatgtccctttctgggttgccaggcagatctctcaggggcctcggtatgtgcaatgtcctctctttccttcaaccttattaagtctttaattatacctaggacgacatcttaatcacttttgcaaaccccactgatctttttctctggcatctcattgtctttgtcaccaccagtatttctcacagccacaggcatgtgtggccatgtatgatgggtagtacgcagtgcacacctctctgacacgctcaagccagccctgggcctgtctctgaagacatgttagaaatttgatactggatttcctgtgcatgttggagattgtgtcttgggcttcacagaccaaaagtctcatcacaaatccttcaaaatatggcccctttggggaaaaaaagatagttaagaagatgatttcaagataactcataggaataaaagctatctaccc

SEQ ID NO: 7287 - DNA, 8313 bp, Homo Sapiens
  XM_166227
agagaactcatgagttttccgcttcatcatctgcttctgttttctccatcttagtttgcccaaagcttgctggccgctgtgtagggctggtgagtggctggggctgtctgagccatgaacaacttcagggccaccatcctcttctgggcagcggcagcatgggctaaatcaggcaagccttcgggagagatggacgaagttggagttcaaaaatgcaagaatgccttgaaactacctgtcctggaagtcctacctggagggggctgggacaatctgcggaatgtggacatgggacgagttatggaattgacttactccaactgcaggacaacagaggatggacagtatatcatccctgatgaaatcttcaccattccccagaaacagagcaacctggagatgaactcagaaatcctggaatcctgggcaaattaccagagtagcacctcctactccatcaacacagaactctctcttttttccaaagtcaatggcaagttttccactgagttccagaggatgaagaccctccaagtgaaggaccaagctataactacccgagttcaggtaagaaacctcgtctacacagtcaaaatcaacccaactttagagctaagctcaggttttaggaaggaactccttgacatctctgaccgtctagagaacaaccagacgaggatggccacctacctggcagaactcctggtgctcaactatggcacccacgtcaccaccagtgtcgacgctggggctgctcttattcaggaggaccacctcagggcctccttcctccaagacagccagagcagtcgtagtgccgtgaccgcctctgctggacttgcctttcaaaacaccgtgaacttcaaatttgaggaaaactatacctcgcagaatgtcctcaccaagagctacctctcaaaccgaaccaactccagggtgcagagcattggaggggttcctttttacccaggcatcaccctccaggcctggcagcagggtatcaccaaccacctggtggccatcgaccgctctggcctgccgctgcatttcttcatcaaccccaacatgctacctgacttgccaggccccctggtgaagaaggtgtcaaagacagtggaaactgctgtgaagcgctattatacattcaacacctaccctggctgcacagatctcaattctcccaacttcaattttcaggccaacacggatgatggctcctgcgaggggaaaatgaccaacttctctttcggtggggtttatcaggaatgcactcagctctcagggaatagggatgtcctcctctgccaaaagttggagcagaagaatccactcactggtgatttctcctgcccctctggctactccccggtgcacctgttatcccagatccacgaggagggttacaaccacctggagtgtcatcgaaagtgcactctcctcgtcttctgcaagaccgtgtgtgaagatgtgttccaggtggcaaaagctgaatttagggctttttggtgtgtggccagcagccaagtacctgaaaactcaggactgctttttgggggcctcttcagcagcaagagcataaaccccatgacaaatgcacagtcatgcccagccggctactttccactgagactctttgaaaacctcaaggtatgtgtttctcaggactatgagttgggaagcaggtttgcggtcccctttggcgggttctttagctgcacagttgggaaccccctggtagatcctgctatatccagagatttaggggcaccgtctctgaaaaagtgccccgggggcttcagccagcacccagccctcatcagcgatggatgccaagtgtcctattgcgtcaaatccgggctcttcacaggagggtccctgccccctgccaggctcccacctttcacccggccacccctcatgagtcaggctgccaccaatactgtcatagtgaccaattctgagaatgcgagatcctggattaaagactcccagacccaccagtggaggctgggagaaccgatagagctgcggagggccatgaatgtcatccatggggatggtggtggtctgtcaggaggggctgcagctggggtcacagtgggggtcaccaccattctggctgttgttatcaccttggccatctacggcacccggaagttcaagaagaaagcatatcaggcaattgaggaaaggcagagtttggttccaggcactgcagcaactggagacaccacttaccaagagcaggggcagagtccagcttaaatctctccccgaaaatggtttctctcatctccagtgtggtcattgctgaccactctgttttcctaagcattgaaatggcaagtgcaaccaaaagtaggtatattcgtgacttcttgtttaggtctctgggccaggaaattcatactgttacatggataaggttgggattggggagagggaacagttgggactagaagcaaaagtgattctgggactaaaataggaagcagatgtcctttcccaatgtgtgttgctgtcttcacctgaatgcatttgtgtaaaaatagcggagggacaatgtgaacatttgtatttggaagctatgaatttactctgaagtttgcagttgtttccaatttgtgagctctaagagtttctgcctgtaagaactactctccttttattttgatttttaaaaacctgtctgaatttcacactcttagagcctggaagagccctgaaaagacacaagtcttgcctggctactgctttttaactttgagggctctatgttgacagactgttatctcctctgggtgacctcaaacatctgaaaagaaagatgttgcctgtgccaattccactttttccagctgccccttgatgaacactcccttataccagaccactcttggacttctgactggtgtcatcaagtcctcagaaaatattttaagttattttaagttattaaggaagggatgatttggagacaaggagtaatgaaagatgggtaaaaactggaaaagattctggtgctaagtactaccccttcatcttccatggatggtcattacctttcctgtcctcctgttatatgaacacacacacacacacacacacacacacacacacacacgcacacacataccacatttcaataagtcttcattgttctgggtccttacctttcctgtcctcctgttatatgaacacacacacacacacacacacacacacacacgcacaccacatttcaatgtctgcatggttctgggggtaacaaaggcaagaagttaaagtaagaccacatttgagtattacttactctgtagaatcaaaacagagtagttaacaccaattatgcaaactacttttttttccagcagaaagggagctgacatgatcaaatccatgttttcaaatgaactgaaaaaggcatccagcaccacttataacacatttatttcagttccaggctgacagccctggggcatctagcaggatgcataattgtcatctggtgagagttgggactttgctcaattttaataccaatctctcctgattgtaattacctccactactttcatgatccccctacaatatttttttaaatgatatatttattcactgaatcaaatgtcattaatgagttatcttctgtggaggatgactgttctctttgttaatgttcacaatcaagatcttgggctgagaagaggcccttcacccaaggagtttgaagtatcacagtgtgtgggaaggtgggaaccaggatacccattcatttccaaccgagacacagagaagtgagtcacagaatttgagcccgctctcttgactgcccagccagagacactgatttctgtaacctcttcacttgatcctgcctcttaagcattaaaacattctcctaaacctctgagtgttttgtgggttctgggtgttttgtacattttagccaagctaaccacttgtctgcaagtactgactttcctatgaattctttgaagattattgagtcagaaaggaaaaatatagccccaaattcccaggcttttaatgcattacattaactgcctattgaaatgagaagttcttcacaaacttgtatacccactaacaagattgcacataaacatgcattaaagtatatactaagaaaccctctgtccaacggctcatgcatatgaagtccgaacatgggagtttgccaattgcattcatcaagtcgttttgcggagtcagatccctgatggaagagctcacaggctctgccttccaagtcctgggttcctaactggtgaccttagcctggggtctgtggggagaccaaccctggcttccaagaaaaccacattccatggactatcagaaatagacacagatttgggtgacaaagctggctctgtatttgcattttatttttgtgttcttgtcagtttgggaatgattaatattaaacatttatttgagaaacaacagcctgtaaataatttaaacacacactatattgcagccaggcaaagagacctttaaaagtgaatattcgtgattctaaaagtgtttttctcccacacgttcacttactcattttcccagcaatgtggtctgttcctttaggcaaacaaagtctagccaggtcaaatgtgtgggtgggtaatatgtggaaaatttgtttttaagtggttggggagggacttcccccacccagtggcagggcttgtggttgcttacagactcagggaggtaacccaaatccctcacagataggtgcactaatctacaaacagcagaaggccaacaagagtaacaattttgtggttgttcatttgccatttattgttctgcaaagacacctcatgagcaccaggtggcgatgtcctttcacggagcaacaccaaagacttcaaaaacattccagttacaaacagaacaattcacttaggacattcacctgcctctcccagaacccccaatctaatgccggggaccacagagaaggaaaggggtcaggggtcctttcttgtaccagtgagccttcccccagttttctcatgcacacaacagtgcaataccaagacgagtacttttgaccaagtataaaaccacagagaagaccaaaatgtacaaaaatgggaagagaatgaaaacacaaaggcacacgcagccacaaatacacaattaaccttttaggggatgagcatctgacgaggtttgtctccaatccaatttgtcatccctggagactctggaagggagaaactaggctgctggtgctaagaccatgaaagggaaggcatggaatcccctacttgggccaggagagcagagcagagcttctagtgggaaaacactctgtgtcaaggtagtagatgcacagggctcagctggcagggttctcactgaaatctagactgcacctttccaggttggcacaagacaaagggcagaggaatgctccccgccttgccgggcacagtgttagaaaggaaattcaagatccctactgcccagaaagccacacaagaacagcacgaggatgaggtagcccctactgggcatctgcagagaggacaagaaagggggcacagacacaatcaaaagcccaggggaaaaggcttgaaggtatgaagtcgacctctccaagtggtattgccacaggcacagcggctccctttccatcttgagtcttcttccttctgctcctggccacccccttccccacctataccttcttctccctgatgtggggaaactgatctctccccagtgcctaattccattttgaaagtctgtcttcttttcttccccacctcctactgcctcattgtgtctttcttcccatggaccctcagcctatttctgcatccttgcggccaagaagctcagcagatacttgaccagtgtgcgaaggtagagacggcatgaggctctccaagtaatctctgtacatggtaacctgacaaagggcatgggtgtgatattaaacaccgcagggatgtctcttccatttagttcaggtgtttccttcctaactatggcaggaaattgccctgtggtgcagtaaccttgggaccagtctcctggtctgctggtgagatacaatggctgcctgccgacaggagacacagggacaaggatggcagagcaattcctcccatcagagctccctctggtggagctgatcaacatccctgtaaccatttggaaagagagcaaaggctcagcaccagcacatccacagaactgggtgacaggcaggtgaatcgactgacaggcaggtgaatcgactatccaccccaatgtcaaaatggctggaggcctaacagcaagcagctatggggctggctttatgaaagattggcctccagttcccatctaagtaccatttttgaaggttctcttgtttccatttttctagcatcaaaaaccttccaaatattatgaaatatatatgcatatatatatatatatatatacgtcaaacccccaaaacatgaggtatataaattcaaattagtatccagaggaacttcccccaaacacatagttcaaagaacccactttcaaagggggaattgggtttcccttcttgatcccccctgttctcctccctggcccccaattcgttccttactgggagccaaaggcaataagaatgttggggaggagatagggtcttgggacacaacaagatgcagattggaccagaccatattgtgatcccaactccattaggaatgagctaaagagattctctccctgctgtaagtcaatctataatagatgagggagatgagggacccagcagctctgggctctgattagcaaatttgcatggaaacagattgaagccttcatagaaacaagactggatggagatgagctctgatccaatcttgaaaagaaatataaaaggatgagttcagccctcacctcattgcatctccccaggcacagttctgtcttcattggggtttcagttcactacgggataggttggcaacaggtgaggaacgtcaaaggaccacagcctggctgttggagccccatcagaactggggtttggcatcttgcaaaacagagtgcagggacatgacgggccttcccttcaagctggcccagcaatgcacacacgcccacacacacacgcgcatgcacagacacagagggcacagagcccagcatgggctccactcacagtgactcgatgaaactcatggaatctttgagctggtctagaatgagttgggaagaaggctgtgggctcctctccctgaggacagttcagatgctcagtgggatgcaggctctggtttgatcagagagggtctagaaacagcatcatgggatgccactccaaagaggaaccccagagtccatccatccacatgagagaaccagatgcctctttggacaggtgagagctgtgaggaggagaggagggcccagagaagccaaggactgtgatgacagcagaatgtgctcccagaggcttttccttctccgaccctcttgggaagaagtgcttccttgctctacaccaaggcatcagtttctgatgtcacagcagtttagtgattcacccctttgcccaccccccaaccttgcacagtgagagctccctgcctccagcagagggagaatagcagaaactccagtctcaaagcagagtggaagtagcaagaagccggctgaggcaagaaaccccggcttcccaaagccaggatatggagtgcctaagcactgcccataccctaggtgtgctgaccatgcccctacttgggaggtggggtagggaggggattcctgcctacccagcaccaaaaactccatgggaacagacccaggatggccctcatcccatctccctttgtgttggatgagatttatgaatgatgtcgctatattcagtctggctcccactgtggttgggagggatgagggatggacacagggcaggaggggaggatagaaagttgggagggcaggacaccaacttcttctacattgactcactctcctcacttcctgtcctgcagtctccatggcccctcccacctcaaagcttttctggcctcagtccttctcctgggcagtgctgtcctcagagatgccctgggcagccagttcagccagcacattatccaggtaattggcatctgggtagccatggccagtgagattagagccaaactctgtcttgtggtggacctcattccagatgacggtgtctgactcgcctgtggtgctggaggtgccaatggcaaaaatgaggcggcgatcccaggccacgagcagcagcttcagaacctagaggga

SEQ ID NO: 7288 - DNA, 656 bp, Homo Sapiens
  XM_208281
tatcagcaagtctccttttgcgggtggcggcgaacgcggagagcacgccatgaaggcctcgggcacactacgagagtacaaagtagtgggtcgctgcctgcccacccccaaatgccacacaccacccctctaccgcatgcgaatctttgcgcctaatcatgtcgtcgccaagtcccgcttctggtacttcgtatctcagttaaagaagatgaagaagtcttcaggggagattgtctactgtgggcaggtgtttgagaagttccccttgcgggtgaagaacttcgggatctggctgcgctatgactcccggagcggcacccacaacatgtaccgggaataccgggacctgaccaccgcaggcgctgtcacccggtgctaccgagacatgagcgcccggcacggcggccgggcccactccattcagatcatgaaggtggaggagatcgcggccagcaagtgccgccggccggctgtcaagcagttccacgactccaagatcaagttcccgctgccccaccgggtcctgcgccgtcagcacaagccacgcttcaccaccaagaggcccaacaccttcttctaggtgcagggccctcgcccgggtgtgccccaaataaactcaggaacgccccagaaaaaaaaatttatcagcaagaaaa

SEQ ID NO: 7289 - DNA, 4627 bp, Homo Sapiens
  XM_291277
atgcaccagaccctctgcctgaaccccgagagcctgaaaatgtctgcgtgcagtgactttgtggagcacatctggaaacccgggtcctgcaagaactgcttctgcctgcggagcgaccaccagctggtggccggccctccccagcccagagcgggcagcctgccccctccaccgcgcctgcctcccaggcctgagaactgccgcctggaagatgaaggtgtgaacagctcaccttactccaagcccacaattgccgtgaagcccaccatgatgagctccgaggcctctgatgtgtggacagaggccaacctgagtgccgaagtctcgcaggtcatctggagacgagcccctggcaagctccccctcccgaagcaggaggatgcccccgtcgtctacctgggcagcttccgaggtgtacagaagcctgctggtccctctacctcccctgatggcaattctcgctgtcccccagcttacaccatggtcggcctgcacaaccttgagccccgcggcgagaggaacattgccttccacccggtgagcttcccggaggagaaggctgtgcacaaagaaaaaccctcatttccttaccaagaccggccctccacccaggagagcttccgccagaaactggctgcctttgctgggaccacatctggctgtcaccagggccctgggcccctgcgggaatccctgccctcggaggatgacagtgatcaaaggtgctcgccctccggggacagcgagggtggagagtactgctccatcctggactgctgccctgggagccctgttgccaaggctgcctcccagactgcaggttcccggggcaggcatggtggcagggactgctcacccacgtgctgggagcaggggaagtgttccgggcccgcagagcaggagaagcggggcccgagcttccccaaggagtgctgtagccagggccccactgcccacccatcctgcctgggccccaagaaactgtccctcacctcggaggctgccatttcttccgacggcctctcttgtggcagcggcagcggcagcggcgccagtagccccttcgtcccccacctcgagagtgattactgctccctcatgaaggaacctgccccagagaagcagcaggaccctggctgcccaggggtgacccctagcagatgccttgggctgacgggggagccccagcccccggcccacccccgggaggctacacagcctgaacccatctatgctgagagcaccaagaggaagaaggcagctccggtgccttccaagtcacaggccaagatagaacatgcagctgctgcccagggccaaggccaggtatgcacaggtaatgcctgggcccagaaagcagcatctggctggggccgggacagcccagacccaactccccaggtgtcagccaccatcacagtcatggcggcccacccggaagaggaccatcggacgatctacctgagcagccctgactctgcagtgggggtgcagtggccacgagggcctgtgagccagaactccgaggtaggtgaagaggagacttcggctgggcaggggctgagctccagggaaagccatgctcacagtgccagcgagagcaagcccaaggagaggcccgccattccccccaagttgtccaagagtagccctgtagggtccccggtgtcaccgtctgctggagggcccccagtgtcaccgctggctgaccttagtgatgggagctctggcggcagcagcattgggccccagcctccatcccaaggtcctgctgaccccgctccttcctgccggaccaacggtgtcgctatcagtgacccatccaggtgtccccagcctgccgcctcgtcagcctcggaacagaggcggcccaggttccaggcaggcacctggagtcgtcagtgccggatagaggaagaagaggaggtggagcaggaattgctgagtcacagctggggaagagagaccaaaaatggccccacggaccattcaaactccacgacctggcaccgtctccaccccacagatggctcctctgggcagaacagcaaagttgggaccgggatgagcaaatccgcctcttttgcctttgagttccccaaggacagaagtgggattgagacattctcacctcctcctccgcctccaaagtcgcggcaccttctaaaaatgaacaagagcagctctgatttggaaaaagtgagccagggctctgcagaaagcctcagcccatccttcaggggtgtccacgtcagcttcaccaccggctccacggacagcctggcctcagactctaggacctgcagcgatggaggtccctcgtctgagctggctcactcgcccaccaacagcgggaagaagctctttgctcccgttccgtttccttcaggctccactgaggacgtgtcccccagtggcccccagcagccccctccactcccccagaaaaagatagtgagccgggcagcctcttcaccggatggcttcttctggacccaaggctcccccaagcccggaacagcaagccccaagctgaacctaagccactcggaaaccaacgtccacgacgaatctcactttagctattcgttgagccccgggaaccgccaccatcctgtcttctcctcttccgatcctctggagaaagctttcaaaggcagtggccactggcttccggcagcagggctggcgggcaacagaggcggctgcgggagccctggcctccagtgcaaaggggccccctccgcctcatcctcccagctgagcgtgtccagtcaagcctccaccgggagcacccagcttcagctgcacggtctcctgagcaacatcagcagcaaggagggcacctatgccaagctggggggactctacacccagtccctggcccgccttgtagccaaatgtgaggacctcttcatgggcggccagaaaaaggagctccacttcaatgagaataactggtcgctcttcaagctgacttgtaacaagccctgctgtgactcgggggatgccatttattactgtgccacctgctctgaggaccccggcagcacctatgctgtgaaaatctgcaaagcccctgagcccaaaacagtctcctactgcagcccgtccgtgcccgtgcactttaacatccagcaggactgcggccacttcgtcgcctcggtgccgtccagcatgctcagctcccccgacgcgcccaaggaccctgtgcctgccctgcccacacacccccctgcccaggagcaggactgcgtggtggtcatcacccgagaggtgccacatcagaccgcctccgacttcgtgcgggactcggcggccagccaccaggcggagcccgaggcgtacgagcggcgcgtgtgcttcctgcttctgcaactctgcaacgggctggagcacctgaaggagcacgggatcatccaccgggacctgtgcctggagaacctgctgctggtgcactgcaccctccaggccggccccgggcccgcccccgccccggctcccgcccccgccgccgccgcgcctccctgctcctctgccgccccgcctgctggtggcactctcagccccgcagccggccccgcctccccggaagggccccgggagaagcagctgccccggctcatcatcagcaactttttgaaggccaagcagaagccgggcggcaccccaaacctgcagcagaagaagagccaggcccggctggcccccgagatcgtgtctgcttcccagtaccgcaagttcgatgagttccagacaggcatcctcatctacgagctgctgcaccaacccaacccgttcgaggtgcgcgcccagctgcgggagagagactaccggcaggaggacctgccgccgctgcccgcgctgtccctctactcacccggcctgcagcagctggcacatctgctactggaggccgaccccatcaagcgtatccgcatcggcgaggccaagcgcgtgctgcagtgcctgctgtgggggcctcggcgcgagctggtgcagcagccgggcacctcggaggaggcgctgtgcggcacgctgcacaactggatcgacatgaagcgggccctgatgatgatgaagtttgcggagaaggcggtggatcgcaggcggggcgtggagctggaggactggctttgctgccagtacctggcgtctgcggagcccggggccctcttacagtcgctgaagctcctgcagcttctgtgagccaagccccagcctgcaccgtcgctgccccttccctgcctaaccctttcctgtctcgccttggaagcacccatgtctccctgggaaatggtacagatgactgggatacctggatgtaaaatatataaatatatatatagaaaatacatataccatatataaatatgaaagactaaggatgctgttgcccgtccacactcgtctcctctctgcactaagtcctccctgttttcttctgtaattatacacatttccagttccatgcaacgtcctgaggacagttctgtgaactgaatgcagcctggacactggcctcaataccttgtttaggatttcttcacccttttgtcaaattgttatttaaagaaaaaaaaaaaagaagaaaattccattaaaattttttttggttgagtcatga

SEQ ID NO: 7290 - DNA, 1198 bp, Homo Sapiens
  XM_292512
atgtgtccatccagtgagtggatcctgggaagcgctgtgaaatgggctggctcccgagccagccgggaggacacttactacagctgctcagaagcaccactggaaactcagatgtgggcgccccagccagaagcagagaggggtacagggaagctacagagaagccccttctgatgccccagggagcaagtcgactccttccaggctccaggaacaccacaaagcaatatgaaacctgttcatgaaaggagtcaggaatgccttccaccaaagaaacgagacctccccgtgaccagcgaggatatggggagaactaccagctgctccactaaccacacaccctccagtgatgcttctgaatggtcccgaggggttgtggtggctgggcagagccaggcaggagccagagtcagcctggggggtgatggagctgaggccatcaccggtctgacagtggaccagtatggcatgctgtataaggtggctgtgccgcctgccaccttttcaccaactggactcccatctgtggtgaatatgagtcccttgcccccaacgtttaatgtagcgtcttcactaattcaacatccaggcatccactatcctccactccactatgctcagctcccatccacctcgctgcagttcattgggtctccttatagccttccctatgctgtgccacctaatttcctaccgagtcccctcctatctccttctgccaaccttgccacctctcaccttccacactttgtgccatatgcctcacttctggctgaaggagccactcctcccccacaggctccctccccggcccactcatttaacaaagctccctctgccacctccccatctgggcaattgccacatcattcaagtactcagccgctggaccttgctccaggtcggatgcccatttattatcagatgtccaggctacctgctgggtatactttgcatgaaacccctccagcaggtgccagcccagttcttacccctcaggagagccagtctgctctggaagcagctgctgcaaatggaggacagagaccacgagagcgaaatttagtaagacgggaaagtgaagcccttgactcccccaacagcaagggtgaaggccagggactggtgccagtggtagaatgtgtggtggatggacagttgttttcaggttctcagactccacgggtagaggtagcag

SEQ ID NO: 7291 - DNA, 377 bp, Homo Sapiens
  XM_294581
atggctctaggctaccctatggccatgggcctcttcaagggccacaaggtgaccaagaacgtgagcaaacccaggcacagcagccgccgcaggcgtctgaccaaacacaccaagttcgtgtgggacatgattcgggaggtgtgtggctttgccccgtacaagcggcgtgccatggagctactgaaggtctccaaggacaaacaggccctcaaatttatcaagaaaagggtggggatgcacatccgcgccaagaggaagcaggaggagctgagcaacgtactggccgccatgaggaaagctgctgccaagaaagactgagcccccttcccctgccctctccctgaaataaagaatagcttgacagaaagaaaaaaaaa

SEQ ID NO: 7292 - DNA, 693 bp, Homo Sapiens
  XM_370681
aaactttcaaagcggctgccgaagatggcggaggtacaggtcctggtgcttgatggtcgaggccatctcctgggccacctggcggccatcgtggctaaacaggtactgctgggccggaaggtggtggttgtatgctgtgaaggcatcaacatttctggcaatttctacagaaacaagttgaagtacctggctttcctccgcaagcggatgaacagcaacccttcccgaggcccctaccccctccaggcccccagccgcatcttctggcagaccatgcgaggtatgccgccccacaagaccaagccaggccaggccgctctggactgcctcaaggtgtttgacggcatcccaccgccctacgacaagaaaaagcggatggtggttcctgctgccctcaaggttgtgcgtctgaagcctgcaagaaagtttgcctatctggggcgcctggctcacgaggttggctggaagtaccaggcagtgacagccaccctggaggagaagaggaaagagaaagccaagatccactaccggaagaagaaacagttcatgaggctatggaaacaggccgagaagaacgtggagaagaaaattgacaaatacacagaagtcctcaagacccacggactcctggtctgagcccaataaagactgttaattcctcaaaaaaaaaaaaaaaaaaaaaagatcagtggt

SEQ ID NO: 7293 - DNA, 776 bp, Homo Sapiens
  XM_371023
ctagagtgcattggggtcttgctgcctttccgctcggctgttttcctgctcaggagccgcagggccgtaggcagccatgacgcccagccggaatggcatggtcttgaagccccacttccacaaggactggcagcggcgcgtggccacgtggttcaaccagccggcccggaagatccgcagacgtaaggcccggcaagccaaggcgcgccgcatcgccccgcgccccgcgtcggggcccatccggcccatcgtgtgctgccccacggttcggtaccacacgaaggtgcgcgccggccgcggcttcaatctggaggagctcagggtggccggcattcacaagaaggtggcccggaccatcggcatttctgtggatccgaggaggcggaacaagtccacggagtccctgcaggcgaacgtgcagcggctgaaggagtaccgctccaaactcatcctcttccccaggaagccctcggcccccaagaagggagacagttctgctgaagaactgaaactggccacccagctgaccggaccggtcatgcccatccggaatgtctataagaaggagaaagctcgagtgatcactgaggaagagaagaatttcaaagccttcgctagtctccgtatggcccgtgccaacgcccggctcttcggcatacgggcaaaaagagccaaggaagccgcagaacaggatgttgaaaagaaaaaataaagccctcctggggacttggaataaaaaaaaaaaaaaaaaaaaaaaaaaaaggagaccaaccaaa

SEQ ID NO: 7294 - DNA, 249 bp, Homo Sapiens
  XM_371273
atgtctggagcccttgatgtcctgcaaatgaaggaggatgtccttaaattccttgcagcaggaacccacttacgtggcgccaatcttgacttccaaatggaacagtacatctataaaaggaaaagtgatgtgatctacatcataaatctgaagaggacctgggagaagcttctgctggcagctcgtgccattgttgccattgaaaaccctgctgatgtcagtgttatatcctccaggaatactggctag

SEQ ID NO: 7295 - DNA, 428 bp, Homo Sapiens
  XM_371299
aggagcagctccttcagagcacaactgagcatctgaagaacgccaaccagcagaaggagagcatggaacagttcattgtcagccagctaaccagaacacatgatgttttaaagaaggcaaggactaacttagaggtgaaatccctaagggctctgccgtgtactccagccttgtgacccttgccttccaggaaccatgcaagaagcgcagccaccagaagtccttaaaacagcaggaaaggtgagcctgtcccccttttgtgcagctacctatctgctgaggagcatctgggcctcattcctccaagtccactggagggtccagaagagggagtcagagatgtatcctggtggagctgggagaaaggcagaaagcctttctgacagctatggaataccgttagccaaggtccacttggcccagcacta

SEQ ID NO: 7296 - DNA, 8164 bp, Homo Sapiens
  XM_371461
atgatcgactggctcttaatggcatgcatgccactgacatactttgtccagggtggagcttgcaaaggcaggatctctgggcagactgccctcccggccctgggaaccaggacagccagccaagccaaagctagaccactggccctcatccccagctttgaactaaacacgtgctacatcttcaggttttcaagttcagcttccagcaacgaagtcaaatatgagaagagtgctgagctgagcggcgagtttcctaaggaaccgagagaaaagcaaaaggaggggcacagtttggatggagcatgcatcccgagaagcccctggaagcctgggacactccgggataagtccaggcagacggagcagaaggttagctctaaccaagaccccgacagctgtcgcggtggaagctcagtggaggccccgtgcccttctgacgtcactccagaggatgaccggagcttccagactgtgtgggccacagtatttgagcaccacgtggagagacacacagtggctgaccagtcgggacgttgtctctccaccacaccccctggtgacatggcccatgcccgtgtctcagaacccaggccgaggcctgagatgggctcttggctgggcagggacccaccagacatgacaaaactgaagaaagagaactccagagggtttgacaatcccgagacggagaaattgggaccaaccacccttttgaatggtgaactgagaccgtatcacacgcctctccgggacaaataccctttgtctgaaaaccacaataataacaccttcctcaaacacttggaaaatcctcccacatcgcagagaattgagcccagatatgacattgtgcatgcagtgggagagcgtgtgcacagcgaggccatctcaccggcaccggaggagaaagcggtcacgctccgcagcctcaggtcttggctctcactgaaggacaggcagctgtcccaggaggtcacccctgctgacctggagtgtggtttggaaggtcaggcggggtccgtccaaagggccagtttgatttgggaagctcgaggcatgcctgaggctagtggaccgaagtttgggggcaattgcccgtttcccaaatggacaggcggggcagtggtgagctcgcacaaagccaccgtggcagtcagcgaagagcactgtgctcccggggccacctccgtcagggctatcaaggctgccatctgggaaagccagcatgaggggccagagggggccagaagcaagccaggagtgggagcaaggggcccaccccagggatgccccctcgatcctctttccagggctacgaatgggccttctgactcccaagcacgaacacatccagatgcatttgctgtgcagaaagggcccttcattgtagccgccagggagggtgatccagggccggcccaggtgccacagcctgcagtcagaatgcggaaagccggcgccatggaccagagaatggacagatggcggcggcggactttaccccccaacgtgaaatttgatacattcagttctcttgtcccagaggactctccacatgtggggcacagacgaacagattatgtgagccccacagccagtgccttaagaaaacctcaactatcccactacagggtggagacccaggaggtgaacccaggtgcttcacgggaccagacttccccagcagtgaagcaagggtcacctgtggaacccaaggcgacattttttgcagtcacctatcagattcccaatactcaaaaggcaaagggtgtggttctgtcaggagctgaaagcttgctggaacattctagaaaaatcactccaccctcgtctcctcattctttaacatccactttggtttctcttggtcatgaagaggcattggagatggcaggcagtaaaaactggatgaagggacgagagcatgaaaatgcaagcattttaaaaactctgaagccaacagaccgtccatcatctcttggggcctggagtctggaccctttcaatggaagaatcattgatgtggatgccttatggagtcatcggggatcagaagatggccctcgtcctcaaagcaattggaaggaaagtgcgaacaagatgtcccccagcggcggagctccccaaaccaccccgactctgaggagtcgtccaaaagatcttcctgtgagaaggaagactgatgtgatcagtgacacgttcccaggtaaaatcagagatggctacagatccagcgttcttgacattgacgccctgatggcagagtaccaggagctgtcgctgaaagtccctggggaggctcaggagaggaggagtcccaccgtggagcccagtacgttgcctcgggagaggcctgttcagctgggcggggtggagcagagaaggaggagcctgaaggagatgcccgataccgggggtctctggaaaccggccagttctgccgaaataaatcacagtttcactcctggcttaggcaagcagctggcagagaccttggagacagccatgggcaccaaatctagccctcccttctgggctctgccaccctcggctccttctgaaaggtatccagggggctctcctatacctgcggatcccaggaaaaaaacggggtttgctgaggatgacagaaaggcctttgccagtaaacatcatgttgcaaagtgtcagaattacctggctgagtcaaagccctctggtcgggaggatccaggcagtggggtcagggtgtcacccaaatcgccccccactgaccagaagaaagggaccccaaggaaatccaccgggcggggagaggaggacagtgtggcccagtggggtgaccacccacgtgactgtggacgggtgccgctggatatcaagagggcctactcagagaaggggccccctgccaacatccgagagggcctgtccatcatgcatgaagccagagagaggaggcgagagcagcccaaagggaggcccagccttactggagagaatttggaggccaaaatgggaccctgttggtgggagtcagggactggagacagtcacaaggtgctgccacgggacctggagaaggaggatgccccccaggagaaggagcgaccgctccagcaggtgtcccctgtggcctcggttccctggagaagccacagcttctgcaaagacaggaggagtgggccctttgtggaccagctgaagcagtgtttctcccggcagcccactgaacccaaggacactgacaccctcgtgcacgaagccggcagccagtatgggacgtggacagagcagtgccagagtggggagagcttggccactgagtccccagatagcagtgccacatcgacaaggaaacagccccccagcagccgtttgtcttctctgtcctcccaaacggagcccacctcggcaggggaccagtatgactgctccagggaccagcggagcaccagcgtggaccactccagcactgacctggaatccaccgatgggatggaggggccgcctccaccggacgcctgccctgaaaagagagtagatgacttctccttcattgatgtaagtcagtggccaggagcatttcttcttaaatggaaattccagcctctctctgtgaattgccacttcaggtgtaggatctgtgtgccagggacccttggagtgggtacggagggcactgtctttgaaatgggactcacttatgcatgtatcttggacctgccatacacctgctgtgtgtcttggggcaaatgtcttcacctctctgagcctcagcttccttatccacttgtaaccagcatcatcagctccacagcctcaaatacaattgcatgcattcaaattaaaactgatctaagcccttacctgctaggtaagcagggagtctgaccacttacccctgggaagtcaccctgaggtttatagttgcaagcatgaagaggctggagtttgctcagaatgattctgctgaacgttctcactaaggtcttgcttggtacaacagtgtccctggtatcaggggatccgactgtctctgtagtggctcttccaggacagaaagtcccctcaggcatgggcacctttcatggaggtcccaggggacagtccctagcactcagctctttcaggtcccaagcacagccaggatgtcagctgccccagcatagcaggtcaaacggtctcctgctctagcatcttccagaccagaacttatcctcctttcccctgggagccccacctccaggggtcaggcaggtcttccttttcaacccttgaaacccaggggtgatgtcattattctcctcgcgtaacaatagggctacctgcccactttctgggggatggaacatctgcaaaatgtgaaagggaccctctctcctggcagtaaagcctcccacctacacacttgggcatggctacccacatttccccagaggaggaacaccgctgctttagaaaaagggcttcctttagggcttcaaagaggattctccttcagtatatggccaaggtctctcgctggcacctctagatcagggcggagacaaagaaagacacaagttgagtcttgattggggaaccccattatataaccatggccatgcccacctccctgggtgtcatcaggatttagttaggtgatatattcagttattcactcaacagacatgtattgagatcttgctgtgtgccttacatgccagcatcatgtcactgcatcatgaactttcctgctagaacgctaagtggttccttcttgatgtccattataaacaacaatcagtgagtgttgaccactggcccaggcacatgttaataaccccagaggcaaaactgcctgcgctttttgcaaattagcaaatcagagtggccatggagtgactctaaatgctggtgtcccgaagcataggtctaacgcttactgaaattatactgcggtttatgtgtgatgcccaccacgatttgggtctcctgtggggatactgaggtttatgtatggtgccaaccatgatttaggtctcctgtggggacggtttggaggccaaatggggaggcggaggcggagcactaaggaatccagtctctgtaccaggctgaggatgcaagggtggcaccatcttcccctccaagccagcccctctgtcagtgtgattctgtcctgctctcttggagtctgaaaacctggctctgttaagtggccggagaagcaagcctgcctctaggtgcagcaggcactttctgatttccgtctttccccctctttcactggtcccgtgcaagtctcctcacaagataccactgtggctggtttgggaagtagctatgatcagctccttccaccaccccattgggacttttgttacttaccattgttgggaaatgattcattgaaattagcctgtcatcactgacttagaaggccttgggtgatggaatttctccaaagtggacctaggcggaagaaaccaacatttcatgtaagaacgtgagcttgccggaaagagctcttggctgtgagccgtggtcaggctctgtctgaaacaagggctttccacacctgagcacagggagttctctcagccactgtaggaaggaggcactctgtttatctcctttttataaatagggacacccaagctcagagaagtgaagctcattgcccaaggtcacataaccaggattcgaacccagcagggtttgaaccccagctctgagcacttcactgctgtctcccgggagaattctgagccaggcacttcccatctccttactggggcccacccagatggtctgtgctccccaccctttcactgggggggccctcaccaaccccccacctgtcgcagctccgagtgtgagtcttcagggatgcctgaaaatggactcctgatgtttagtaagctgccccctcccttcccacctgcaccctagattatgtgagtaatggaggaattccacggagaacgtctcaacccggggactctgtgtgaatacagttgacagaaggatttagttagatgttgaatccattattcattcaacaaacaaacattaattgagctcctgctgtgtactgatcattgctgtagattacatgcttgtgtggtggatgtcactgggagggaaaaggcatttgtattatgtgcctactgggtgccaggaagccaggcactgtactagggcactcaaggttcattgttccacctgacttttgtcatcagcctatggggtatgttttatggggaaatttaggctttgggtgttaggttactattaaaatgtggaagccctggcctaggtaccacctaaatagcctctcatctgtcaacgaagctgtgtaccgccaactgtgttgtggtaccctccattgatggttcccttgatttttttcctcttcctccctgctgctcccaaagcaaacctcagtcctcgactcaagtgccctcaagacccgggtgcagctcagcaagagaagccgccgccgggcccccatctcccactccctccggcgcagccgatttagtgagtccgagagcagatcacctttggaggatgagactgacaacacgtggatgttcaaagactcaacggaggagaaatcacccaggaaggaggagtcggatgaggaggagacggcatccaaagctgagaggacccctgtcagccatcctcagaggatgcctgcgtttccaggcatggatccggcagtgctaaaggctcagctgcacaagaggccagaggtggacagtcctggcgagacccccagctgggcaccccaacccaagagccccaagtcccccttccagcctggggtgctgggcagtcgcgtgctgccttccagcatggacaaggatgagaggtgaggggtcttggggaatgggggtccctctccttccaaactcaggctatacttctagagaggtgctcgcataggttttagagctgaatagaagagagttacaactttttaattttctctagcagcagaagctttgttcatgagaattctcaatactcagatacctaaaaagtacaacagaggccggggaaggaggccaggaatcaggccagctggcctctcctcttccccgcccactgccacctgctacatggaacgccagggcaccattgctggagaactactgatctagtttagccctctccagaccgatggggaaactgaggcattctccctcctcttcccctttggggaagtatctttattatcagagatctggaggacctgggaaggtggatcaaagggcacggccaggttgaatgagatcggtttcactcccttcgtggaacagctatcccgatcctgggctgttctgtgtagagacgagcacaaagcagcttctgccccccaagaggctctcaggctctcagaggggtgtttcagcagctggaggtggaggttaagaacaggggatctaaggtcacacagccagggtttaattccaccattgctgcttaagagctgcatgatgtgggaaaaggtacttgacctcctgaacctcagtttcctcaactgtaaagtgggttttctaacctcctaaccttccgaggtggtcatgaggatgaaacaagagtgtgtctaaagccctgtgcctgagccctgggatgtagaagtactcagtgaagcagagtggaaatcttatcatgagcactgttaatccatgaaagttagggattgttcctgatgctagagttgtaatgatagtaagtgctggttggatcagagcaagagtgggtaagctatggcccacaggctaaatccagcccacatcagtttttgtaagtaagctttattggaacacagccacatgcattcatttatgtattgtccataactgctttagtgctaccactgcagagttaagaagtagcacagatgtcccacagcccacagaatcaggaatattttactctctggccctttctctgacccctgtgatggagggaggcaggtgaagggctcataatgcacacttgaggatgggcggcagaaaagacttccagctgggtgcagtggctcacgtctatagtcccaggactttggaaggcagaggtgagaggatcacttgaggccaggggttggagtgcagtgagctatgattgcaccattgcactccagcctggactaaagaatgagaccttgtcacgaaaaataaaaaaa

SEQ ID NO: 7297 - DNA, 3046 bp, Homo Sapiens
  XM_371511
tttttccttctccttctattaatgaacagacaatatttaaattagcattattagcagtgactagtattcatattctacttgcaataatttttttttaagaaatgatcaggatgtagttagattttttttatagtttattcagaatatttctctgttcgtatccagccccttgactgttgccctaaatttaaactctccccgtcatttccaaatatttccaagtaggcaatgtagtacttttgtttgtttgtttgtttggtttgtttggttgtttgagacagaatctcactctgtcacccaggctggagtacagtggcacgatctcggctcactgcaacctctgcctcccgcattcaagtgattctccagcctcagcctccccagtagctgggactacaggtgtgcaccactgcgtctggctagctaatttttgtatttttagtagagaccgggtttcaccatgttggccaggctggtctggaacccctggcctcgggtgatccacccacctcggcctcccaaagtgctgggattacagagtgtgagccaccacacccagccagcaatatagtactttttagaaagatttgtagattagagtcccagtatacattgcggccccaacccatgcctgctttggaaaacatattttctctgtgctagtatagtcatggcacatcagcctatatatcctcatgttcagcaagtgcacgttaactgcttttgaaattattattataataaatctgttactcaggtgctctcatcagatgttccttcaggtacagaaactgaggaggaagatgacggcatgaatgacatgaatcacgaggtcatgtcattaatatggagtgaagatttaagggtgcaggatgtgcgaaggcttcttcagagtgcgcatcctgtccgtgtcaacgtagtgcagtacccagagctcagtgaccacgagttcatcgaggaaaaggaaaacagattgctccaattgtgtcagcgaactatggctcttcctgtaggacgaggaatgtttaccttgttttcgtaccatcctgttccaacagagccattgcctattcctaaattgaatctgactgggcgtgcccctcctcggaacacaacagtagaccttaatagtggaaacatcgatgtgcctcccaacatgacaagctgggccagctttcataatggtgtggctgctggcctgaagatagctcctgcctcccagatcgactcagcttggattgtttacaataagcccaagcatgctgagttggccaatgagtatgctggctttctcatggctctgggtttgaatgggcaccttaccaagctggcgactctcaatatccatgactacttgaccaagggccatgaaatgacaagcattggactgctacttggtgtttctgctgcaaaactaggcaccatggatatgtctattactcggcttcttagcattcgcattcctgctctcttacccccaacgtccacagagctggatgttcctcacaatgtccaagtggctgcagtggttggcattggccttgtatatcaagggacagctcacagacatactgcagaagtcctgttggctgagataggacggcctcctggtcctgaaatggaatactgcactgacagaaagtcatactccttagctgctggcttggccctgggcatggtctgcttggggcatggcagcaatttgataggtatgtctgatctcaatgtgcctgagcagctctatcagtacatggttggaggacataggcgctttcaaacaggaatgcatagggagaaacataaatcaccaagttatcaaatcaaagaaggagataccataaatgtggatgtgacttgtccaggtgctactctagctttggctatgatctacttaaaaaccaataacaggtatttctacccactcacccttcctcccacggtgatagtgtgatatcctctctgaccttggttgtaaaattcagttatctcatgtgtttctttcccctgtgctggattaagctgattttcgttctttcaagtactgtaagtttttgaaagaaaactggcagtatttgaagttataaagattttacctagaaataatgtatttggctattttaattgtatttgacaatatagttttcaatttctgttcatttctgttttgtagttgatgtcagtaacacccaaacaatgcccatgtttgttttcattaatttagcatattgctgtgaggactggttaagccagaaatacttatcattagtgtgatcttggctaccatgtaaaacaatggtttttgcctacttcaagagcttttgtaattaccaaaccgtctaccttcctaacttgctatattaatgctgatgcttgaaagtaagatctttggcatttatgcttacacgttgcatgaagagtaagttgagtacaacatgttatgccatgtattaagtctattaattaaaaacaaattctaagattcaaggagcttttcagtgttccacatttctccctttagaaaaagtaaatgtgtgcagaattaacaaagtgtttaaaaatagatatttattattttactatttggatgaatgtgtagggcagtgcttccttggcactggggatatttcattgagcaaaactaaaaatatcttccctcatggagtttatgttatagtaagacatacgtgtacctctataataactattacgttagaaggtataaagtattgtgaaaaatatatagagcagtagtggagtgggaagaaatgttttgaaatagagcttgagattcttgattgtcttgccctctacttgaacagtgtcttctaggaagcccagacacatggagaagttctgagtgttttggccgatagtcccagatgaggttccagcaacagctgggatcacccatgagatgtgagtgaggaaggctttgagatggtttcagccctagccaccactgacctcataagagaccacaagaatgagaatcacctggccaagcccagcagaccttcagaattcagaaataaaataattcatctta

SEQ ID NO: 7298 - DNA, 1777 bp, Homo Sapiens
  XM_371655
atgggtggcccccggggcgcgggctgggtggctgcgggcctgctgctcggcgcgggcgcctgctactgcatttacaggctgacccggggtcggcggcggggcgaccgcgagctcgggatacgctcttcgaagtccgcagaagacttaactgatggttcatatgatgatgttctaaatgctgaacaacttcagaaactcctttacctgctggagtcaactgaggatcctgtaattattgaaagagctttgattactttgggtaacaatgcagccttttcagttaaccaagctattattcgtgaattgggtggtattccaattgttgcaaacaaaatcaaccattccaaccagagtattaaagacaaagctttaaatgcactaaataacctgagtgtgaatgttgaaaatcaaatcaagataaagatatacatcagtcaagtatgtgaggatgtcttctctggtcctctgaactctgctgtgcagctggccggactgagattgttgacaaacatgactgttaccaatgaccaccagcacatgcttcacagttacattacagacctgttccaggtgttacttactggaaatggaaacacgaaggtggattcatcattcctttccctttatgacagccacgtagcaaaggagattcttcttcgagtacttacgctatttcagcatataaagaactgcctcaaaatagaaggccatttagctgtgcagcctactttcactgaaggttcattgtttttcctgttacatggagaagaatgtgcccagaaaataagagctttagttgatcaccatgatgcagaggtgaaggaaaaggttgtaacaataatacccaaaatctgattggtcatatttttccaaagagtaatgcagtctggatataaacgtattttctgtcttccttataaggggattctcccagctgctgaatttaaatagtaaatatcacattttgttattaacacagctataacttgccgtggttctcagatttattttggactattttgatgccaagtgagtataagagcttgtactgaaaccatttatttctttctattttgctatttgcaaatgcttgttatcttccctacatgaagtggcagtaacctttttcacatttaagctacccttctaccttttgaagtgatttgcagttactcatctgagacagcatcagtatttgactaaatcattgtttcacaactgaatagtcttgttcttttagtagcaatgaaatcctaagctcttgaggccattcacctgccaacctgaccatactgctttcaaaagtcttttctcatcagtagaatctattttggtcacttctagtcaatgaaaaatgtaaacttttaggagagaatgtttcctaggactcacccactccattcaatgttacatataaaatagtgtgatcaatcacaatgtccatctttagacagttgattaaataaattatctggtctttgaaaagaccgtgctgggcgcggtggctcttgcctgtaatcccagcactttgggaggctgaggtgggcagatcacctgagatcgggagtttgagaccaagcctgaccaatatggagaaaccctgtctctactaagaatacaaaattagctgggcatggtggtgcatgcctgtaatcccagctacttgggaggccgaggcaggagaattgcttgaacccgggaggcagaggttgcagtgagctgagatagcgccattgcactccagcctgggcaacaagagcaaaactctgtctcaaaa

SEQ ID NO: 7299 - DNA, 1974 bp, Homo Sapiens
  XM_371741
aatgcgcccgccgtgtccgtggagagaggctgaggcagccaacctccggccccaggcaccggggcgccgggacggcgaaaatgtcgccttccttagtccgggcaactgcccgggctgtgagcaagaggaagctgcagcccacccgggcagccctcaccctgacaccttcagcagtaaacaagataaaacaacttcttaaagataagcctgagcatgtaggtgtaaaagttggtgtccgaaccaggggctgtaatggcctttcttatactctagaatatacaaagacaaaaggagattctgatgaagaagttattcaagatggagtcagagtattcatcgaaaagaaagcacagctaacacttttaggaacagaaatggactatgttgaagacaaattatccagtgagtttgtgttcaataacccaaacatcaaagggacttgtggctgtggagaaagctttaatattcgaaatctcaggactcttctggccgtaggttccaggaaagctcgtggaagctttggggctcactgcagaaatcatgtgactgtcacgtgctggaaaataaagtgatacatcttgaaaatgaagccagtgtgttggattccggaagaaatgatatttgtattctctgtaggggacaaaatgagaagtcatcactctttttggatcatttagatctcttgcatcctttgttttagaaccagtttcattaaagttgccttcctggacacctgtttatccctttcctgaactgtgtgcactccttagatcgctattgaatggcttgagcttccctcagcatttctcccaaccagatcggcgactcctaaaatccgagacaggacgtcctgactgctggtagtaatatggtggtgcattgttttttccacccgaacttaacatagcctttttatacatttttatgaaaaatttcattgtcagctgcctcattgtataccctttaatagtaccaggcaaagattttcttcaactatagtacagattagttctgagtgatggtatcaaaaggtgagaaagacgtcatccacctgttttttaatccatttcttttgccaccctatatgtctgttcagagatgggatctcaagctgactttgattcttttagttgaggagtctcttaaagccatctagcccacctccctcaattccctatgtgaggaaacaaaaccccagggaagccaaagggctcctctccaccctgactctacaggccgggggagagtagggactctacccctctctccccttccttgtaggtgacacatgctctgccctctgaggcagtcagcgaaggcaaatggtctgactgctttatgtggtcaacattttaatagaatttctttataatttgatacaggttatattatttttattttattttgagtgggaagaattttaaaacctttttatgtgaattacctcttgtttctttcacctttgaaacagtggtttgtaggagagatgacattgtagcaacccagaattctgcttttggaatgtggtcctcactgtgcaggagaacatggggatcttttgttaaaattcccagtgtgcatacactttctggttcctcggtccagttgctaaagttcttagtattttagcctaacatatttatcaccaacttttctttaaaagtgttccttttgtcacttagttactgattttcctgggtttgacatattaagtattctatgagatgatatatatgctttttttgaaagctgattctcatgaattcaagtagctgagttcctttatgtttagtttattcactaaagtagctggcacaaaacacaccaaaacctagagcaatagctttatgcaaatgctcatgagtttgtatcaataatatgattgttggatccacttataattcatgcaatactgtatgtatgtagagattgagttgtcaatttaaaaaaatgtgtcctctttgtgattaaaaa

SEQ ID NO: 7300 - DNA, 4740 bp, Homo Sapiens
  XM_371783
ataggtcttgcctttcattttaactgccattctggcaactgaacgttggcagtaaacgcagcttagttgtctcagaggactcacaatgggatgtgcttatagttgttgcctcgaagtgtgttgtggcgaggatgaaatagtgtatcctaggatgccaggggaatccaccgtctgccaccgcgagcgtgagaagccaatcacctatcactggtatcactggcatcccggccatatataccctagagttgcatcaatggaagattacgatgaggacctggtgcaggaagcttcatctgaagatgtcctgggcgttcatatggtggacaaagacacagagagagacattgagatgaaacggcaactacggcgactacgggagctccacctatacagcacatggaagaagtaccaagaggcgatgaagacatccttgggagttccacaatgtgagcgtgacgaaggctccttgggcaagccattgtgtccacccgagatactctcggagacgttgccaggctctgtgaagaaaagggtatgctttccatcagaagatcatctagaggagtttatagcagaacatctccctgaagcatccaatcagagtctcctcactgttgcccatgcagacacaggcatccaaaccaacggtgacctggaagacctggaggagcatgggccagggcagacagtctctgaggaagccacagaagttcacatgatggagggggacccagacacactggccgaacttctgatcagggatgtacttcaggagctgtccagttacaacggcgaggaggaggacccagaggaggtgaagacatccttgggagttccacaacgtggtgacctggaagacctggaggagcatgtgccagggcagacagtctctgaggaagccacaggggttcacatgatgcaggtggacccagccacgccggcaaagagtgacctggaagacctggaggagcatgtgccagggcagacagtctctgaggaagccacaggggttcacatgatgcaggtggacccagccacactggcaaagcaattggaagactccaccattacaggcagccaccagcagatgtcagcaagtccttcctctgcacctgcagaagaagcaacagaaaagaccaaagtggaagaggaagtgaaaaccagaaagcccaagaagaaaaccaggaagcccagcaagaaaagccggtggaatgtcctgaaatgttgggacatttttaatatattttagagacctctgaagattcctcgaccaccaggaagggccccgacgtggggatgtcaacatggctcagacttgatgtggatcgtgatcatttcgggaaatgtgttactccaaaaacttttataatctttgcttaatttgtttttaaatactttcctggctgggcgtggtggcttatgcctgtaatcccagcactttgggaggccgaggcgggtggatcacctgaggtcaggagttaaagaccagcctggccaacaaggtgaaaccccgtctctactaaaaatacaaaaattagctaggcgtggtggcgcactcttgtagtcccagctatttgggaggctgaggcaggagaatcacttgacctcaggaggcggaggttgcagtgagccgagatcatgccactgcaccccagcacctggctacagagtgagactttgtctcaaaaaaaaaaaaaaaagaacaaaaaaattctgactttaacctctgtttttcagagggcacaaattgttcttgtattgtttccattttacatttttttcttgaagttattttccaattgttttcattctttctgaagttttgtttactcggttttaagtttttgtaattttgatagacttttgtgctttcattttcttaatgacttttacctcatttttaaaacaaatccatagtatggatgatattgatgatgaaatgtcttacgatgatcatttagaggtttattttgaacaactggcaattccaggaatgatggaataaagcatacgaagtagaaggactggaacctccagaaaaagtactttaagttacctacaggtgatcctagtcaggtatgaattgataagaaatgcctgcaccttccctccttcctatctttcccttgcctacagaaaattaaaaggcaaaacaatagacatctgcatattcttcattcagatcaaccagtggctagcatttgccaccttttgcagtttctttctctttccataagtactttcttctctgaatcatttgaaagcaaatgaaaacagtagcctaaagtgtcagtttcaaccagaaaataacagctctgatttctcatggctcatactcgtctgaaacgactcaggtagaggctgaggaaggccgtgttgtttgtctacctgggactacacctactgaaagaagttctcaagttctgattgagttctaaaattttttgaagattggaattcttcatatggcaccatgggcccggcactgccacgttttccaaggaacctgccggagctcctgcggaagctgctcctcaggcgatggagtcccttcgctggtaggcccttcttcagtcaccacaggatgcctgccattcatgaacaagaaggagaggacgggctttgaataaaaaacaggatccaggaaatatttgtgaggccatttggacttcagtgtgaaatggtgttaaaagatgaagtcatttattcaagaagtaaacctctgccacctggactgtgcgcagacatttcattgattttgtttaataaacattttctggctttgggaggtgtctctcttggtagaacacagtgtcaaagatggacaagatggacacatagtccattatttggtattgtttgtgtatgggagcagaccacaaattaatgtttggagaacaattttgtcataacacactgttgaggctcagttgtacagaactggaaaagtcttcagcttggcacatgtcctgattcagcctttgtttaacatatattccaatccggattctatcttcactggctacaaagaccacctgatacgtgcaccacgacacaggagctgctggagagggggtagtgttatcacctcaaacccacagccatatttttcaaaagccagcttagagagaggtgtactgatagctgcatagagaacatgcagtccatccattcttcccagtgatgtacatttctcaatcagtaaccacgtggtataccagccttgagtgtcacatctcccaaccataccaaatggatcacctaactggaggtggggggggccctcagaaatgagatttcgtatttactgtaaaattgccttattttttcttttgaggtggagtctcactctgttgcctgggctggagtgcaatggtgtgatcactgctcactgcaacctccgcctcctgggttcaagcagttctcctgcctcagcctcccaagtagctgcaattacaggtgcatgccaccactcccagcaaatttttatatttttagtggagacagggtttcaccatgttgaccaggctggtctcaaactcctgacctcaggtgatctgcccaccttggcctcccaaagttctgggattaaaggtacgagccaccgcaactggctgagaatctttttatttgctgatttgtctcttgtgtattttctttgttcagatgtctcttcagatctttttctcacttttaaattgttttttaattgttaagaattttctgtctagtttagatataagccctttatcagacatgtgttttgcaaatattttctcctagtctgtggcttgtattctgtctcttaacactcattttatttttacttttggaactaaagaagaagaatggtcagctttccattattcttgtaacagtaatggcagaaccaagtctgctaatgctacactgagcaaagaaagtcacctggtgaagtccaacattaatgaaatggggtagtacatgcaggcagcgttgggggtggggagggaacaaatgcttcttgagagtaatataatctgccataccatccaggaacctacaatggctatctattaccttattctctggtttgtttaatgttcgaatctttccgaaagatccttcaacctttctggaagaatctaatctgataacaccatcaaaaacacattacttcttttggcataatttaaattgtaagacatcattcacatttatcaatgttacatatataagaactcacccaccatattcttccttgaggaattacagcatgtaattctataatcatttttataatcgtctaacaattttataatggattggttgcttactatcaattttttaaaagtcatggcttctccagtcatttcttgcttatcgaaattatttcatgagatgggtctctccttgtatatttgaaaatgaggtttgcttccttctacttaaaaaacaacttgaacatacctgtttggatcacatggtcttgtcctgataacttggaagaggttgcttcagcattgttcttattgttgtggtggttattattaatattgtttcatattctgtttaaaaaattaaaattttacacaagaccaatgtcttcttttcaattccagtacatttttcagaagtaactaatgctattggctttgtgcattgtaatttcagaccattttatatgtctttagttatatgtacagtatacacacatatgtgtcatattattccattttttctagcattaaacattgctat

SEQ ID NO: 7301 - DNA, 1191 bp, Homo Sapiens
  XM_372780
atggccatattctccattggttgtatgattagctccttttctgttggactgtttgtcaacagctttgacaggcgtaattcaatgcttactgtcaacctgttggctgccactggtggctgccttatgggactgtgtaaagtagctgagttggttgaaatactgatcctggcctacttggttattggcctcttctgcagactctgcacaggttttgtgcccacgtacatcggagacatctcacctattggcctgcaaggtgtctttggcactctcaaccagctgggcattgttgttggaattctggtggcccagatctttgatctggaattcatcctggggtctgaagacctatggcctgtgctattaggctttcccatctctcctgctatgctacaaagtgcagcccttcctttttgccctgaaagtcccagattcttgctcattaacagaaaagaagaggagaatgctaaggagatcctccagtggttgtggggcacccaggatgtatcccaagacatccaggagatgaaagatgagagtgcaaggatggcacaagaaaagcaagtcactgtgctggagctctttagagtatccagctaccgacagcccatcatcatttccatcatgctccagctctctcagcagctctctgtaatcaatactgtgttctattactcaacaggaatctttaagggtgcaggtgttcaagagcccatctgtgtcaccattggtgtgggtgtggttaatactatcttcactatagtttccctatttctagtggaaagggcagtaagaaggactctacatatgataggccttggagggatggctttttgttccatcctcatgtctgtttgtttgttattgaaggatgagtgtaatgggataagctttgtctgtattggggctatcttggtctttgtggtcttctttgaaattgggccagaccacattccctggtttattgtggctgaactcttcagccagggccctggcccagctgtgatggcagtggccggctgctccacctggacctccaacttcctagtcagattgcttttcccttctgctgcttactatttaggagcctacgtttttattatcttcaccgacttcctcattaccttcttgatctttaccttcttcaaagtccctgagatgtgttacaggactttcaaggatatcacatag

SEQ ID NO: 7302 - DNA, 597 bp, Homo Sapiens
  XM_373056
atggagacaggcaggcaaacaggtgtgtctgctgagatgttcgccatgccccgagatctgaagggcagcaagaaggatggaatccctgaggacctagatgggaacttggaagaacccagggatcaggaaggtgagctcaggagtgaggatgtcatggacctcacagaaggtgacaatgaggcctcagcctcagctcctcctgcagccaaaagacggaaaacagataccaaaggaaagaaggagaggaagcccactgtggatgcagaggaggctcagaggatgacaaccctgctgtctgccatgtctgaggagcagctgtcccgctacgaagtgtgtcgccggtcagctttcccaaaagcatgcattgcgggtctgatgcggtctatcactggcagatcggtgtctgagaacgtggcgattgccatggctggaatagccaaggtctttgttggagaggtggtggaagaggccctggacgtgtgtgagatgtggggagaaatgcccccactgcagcccaagcatttaagggaggctgttcgcaggttaaagcccaagggcctcttccccaacagcaactacaaaaaaatcatgttctag

SEQ ID NO: 7303 - DNA, 1449 bp, Homo Sapiens
  XM_373266
atggaggccagggcttccctgaaccccagtgaccacaagctggatgagaagctgtgccagaggctcacacagcgctatgtgagcgtcatgaacaggctgcagagtctgggctacaacgggcgggtgcaccctgcgctgaccgagcagctggtgaacgcttatggcatcctgcgagagcgcccggagctggcggcgtctgagggcggcccctacaccgtggacttcctgcagcgtgtggtggtggagaccgtgcaccccggcatgctcgccgacgcgctgctgctgctctcctgcctcagccagctggcgcacgatgacggcaagcccatgttcatctggctgtgccacgcggccttcacccctgtgactccccgcagctcgcgcggatgcaccgacgagtcagcttgtcctctggaagccaatgagtctccccggcgccccgtggccgaagagctaggtgtaccatgcaatccccgcccgactggtccccggcgaccgacgccccgcggccctcgcccttcccgcccccggcgctgcacgccctccacggcttggcccgcgcgctgctgttcccggcctactgggccctgcaccagctgcagggtggctgaggagggcggcgggcggcgggcggcgctgctgctgctgctgctggtggtcggcccgcccctggcgctgcccggcctgccgctctggctggtgccgcaggtttggcgccgccccttctgctaccgctcccctccgctgtgctgggcgccgcccgcgctctggcgcccgcctgccgaacccgggcgctgcttcgtcttcctcaccgccaatctgtgcctgctccccgacgggcaagcgcgcttcggcaacctaccgcacagccagcgaccggccgaggccattggcgccgcgcggcccgcgctctacagggctacggactgcagccagccgtggtccagggcgccgcgcgggacgctggtggcctcgctgcccgtgggtctggactttgtgtgcctgcaggaggtattcgatctgcgcagggctcgtcgcttggtgaatcgcctggcgcccaacctgggcccgttgctgtacgacgtgggcacgctcggcctacagcccgggcggcacctcaagctgctggacagcgggctgctgctggcctcgcgctacccgctgctgcgcgccaccttccgttgcttcccccacgcacgtggcgaggacgcgctggcctccaagggactaccgtccgcacaggtactggcctatccggtgcagcccgcagagggggcgggggttcggccgagaaggcggagaaagctggagccgtccgtggtgttgcaggcgaggctgggcagcctggacgggcgccgcatcgtgggattcctgcactgcacgcatttgcaagcactggctggtgagccctgcggatgggtcctcggaacaggtcccgcctctccatag

SEQ ID NO: 7304 - DNA, 10889 bp, Homo Sapiens
  XM_373737
ggtccgaggctgggggagcagccgttggctctggtgcccctgggggtgggagcacgagtgggcaaggatgatggtgaggcagaggaggcggccccgagggagcgcccggctgagaggcggggggccgaggggcccggggagcgggcgtcaccgagggccctggaagcggcagggctgggggagaggagacgcgtgtgtggagcatggggaccccagcccagctcccacttgcagacctgggccgcgggctgccggccgagtggccggggggcctggctgcccaggaggcgggccggggccgcggccgggggcgcggagcggagttagggtcgccaggccgagccgaggtgggacggaccgacgcagagaggaagggaagccacctggcctgaagatcctgtctctaagatcccattctgaggtccacgctgcttttatgagctgtaacactcaccgcgaagatctgcagcttcactcctgagcccagcgagaccacgagcccaccgggaggaacaaacaactccagacgcgctgccttaagagctgtaacacttgccgtgaaggtctgcagcttcactcctgagccagcgagaccacgaacccaccagaaggaagaaactccgaacacatctcaacatcagaacggacagactccagacgcaccaccttaagagctgtaacactcaccgcgaggttccgcggcttcattcttgaagtcagtaagaccaagaacccaccaattccggacacagtagcatttgggaataataagaattgtagctgggcatggtggtacacgcctgtagacccctagcagctgccatcatcctcaccatccgcatattattgatatattaactctttgatggcaaccatagcttatcccccttatctccctatgccctacagcagggcagtggaatggttaagaggctttgaagtctaagagtgctggcttaaaaccctaatttgtcattttggatgtgtggctttggacacttggggcaggtcacctatgttcttcaagccctgtatccttatctgtcagatgatgatttttttttttttagacgaagtctcactctcttgcccgggctggagtgcagtggcatgatctcggcttactgcaagctccacctcccgggttgacgccattctcctgcctcagcttcctgagtagctgggactacaggctcctgccaccacccgtggctaatttttttgtatttttagtagagacagggtttcaccatgttagccaggatggtctcgatctcctgacctcgtgatctgcccgccccagcctcccaaagtatcagatgattttaacaactatgcttccatgacttgctgggctagatgatatgactgtaaaatgcctaacccatggtttagcatcaagtaagcaaattgtaaatggtagcactgctctgcctatgactatttagtcttgtgctttaaactcaaatatttgttggcctactgaagtcaccacacagagaaagatgcttttcattctcagtaaagaactttgggagataactggggcaggcagcaagagaacagatgtcatatgtctagcatcagcaaactcatcagaactgatgggcagctcactttgcttagaacctgcaccagcatacacacggggctgcttcccagtcacactgctcctgggaaggtaggggggctgctgttctgcaattagcgcggttctttacctcctattaccgaactgccagagttcatttgtgttcagttaggtagatgaccaattcttgttcattcctattttcttttgctcactaatgtgtttaacgttcactaacctaccaaatgtgatttattagcgactttttctttgaagatggagtggaggaatcctagcgctttctgcaacatgctactgctgttatggaacagtgcagatatggaagtgcatcagccggggatggggagaggctagggcagtacatgtgaatggagaggtagccccaccagtgtgttttctgaaatacagtcccgcagagggcagtcttgggaaattactgttctcacacactcttcttgaccctacccctccagcacctcccttgctatccaagggttgggatttttaaaaagaaaaacaaattttaaaaaaagcagtgtgaatcttttgccatcttgtaagggtgaaaagccccctaccaagtcgggatgaacattcatgcgtgtgcttgagggcttgggaaaaagacagggcttggccccacagtgcaggtaggcccagtgatcctataataggggccaggagatgggaggtcccctgtgggcaggagttcaagtatgtggtattatatgactggtgcttgatgaacccagggagagggcaccaaaaacaatggtatttaattgtaaaatctccaccccctgaggatatgttttcaggtctgggtgactaattagactgggaaacaagggcaggaacgatggccctgtgcttgctctgcccgctgcctctgtggatgtgtgggctgctggcttcagtcctgcttttctttctgatggtattgtttatgctatgtgtttttgcaggaggcctgaggtgggctgggttctcctcctatggcagggcttcactctcctcctccttctctgttggggcttcactgtccctgggataagaataacaatgccaaggttttcattcttgaaaggagcaattaagcgtctcaccccctcctcattttagatgggaactgtgagggtcccgtcatttacccagggtccctgttgaggatcttgtcctcattagatgacttcttgtgcagcttccatgcgtgattctttactcttgtggcactgagaggtttgtacatgtctttaagccagagcggctttctgaatgaaaaaagtccatcctagaagatagaaagggaaatattaattttgcatgtcctctgctttccctggtcacagcaatgaatcctccaatgtacctgactctccctttgcgaagagcatctccgtggcagaaatctgaaaatgcccctggggagacacatgcacaagacagtgagtgatgcagccgtttcccacgtatctcacaatgtacttctctggtcttattagaactaaatgagtatctcagtccataatcacagggagaagaaccaccacagaccacatacctggggtcttgaaaataattccatgcatgtgggactttcagaagctctccatgtctgtccagaagggccccacaatatactggggggactttgtatgtggctcagcatggagcaggggcaggatgttcattcccactcatccccttggccaagtgcccttgtgcagtgaacaaactgcacaaccatgctgggcagaagcattttatatcagtccccttcggacttagtctcacaggcatcatttgatggggggtgggagatgaagtggttcttccttttctagatactttattctataagttggatcacctcaagcaaatgcctgagtgcagctagccaagttctctatctcacagtcttcatacagctggctgtcgctgatgagtgagtgagctgcgaaatcagcttaaaccacaacatgttatttttgaatttgaataaaataggaaaaggcagagtgcattgtgtgaccatggggtaagacactctccctttctccttctcagttttcctgtcataaaaggacaaactactatctaagttctccgtagttaaaattcttttttgttgtttttttttatttgagacagtttggctcgttccccaggctggagtgcaatggtgctatcttggctccctgcaacctgcgcctcctggtttcaagcagttctcctgcctcagcctcccaaatagctgggattacatgcctgtgccaccacacccagctaatttagtatttttagtagagatggggtttcaccatgttggtcaggttggtcacgagctcctaacctcaagtgatcccaaagtgctgtgattacaggcgtgagccatcctgcctggcctttctggttaaaattctgtgaggtttgtgtaaaaggaatagagtgggggcgcaaaaaccagtaagatgagaaaatagtgtttcctcagttctagtatccaggggaaaaaaagaaaagagaaaatactgtttcctgccacttaagaggaaggactcacatatcctaccttccatcagccttgaaggagacaagtgccctctctctcacacccggtggccttcccttcccctttcccagagcctccaagaaggcccctggcctggcctgatgcccaccatcagcagcaataggcaccaaaacctttctccttcctatccctccccacctcccaaaagggctggggacagcaggtgtatccttgttagttccatcatgagacagcacattcctacaatgtcgtacagatgtaaattctcaaattaatctacaaatttaacgtaatcctattcaaatcccaagatagtttttggtggtggctgtttttaagacagggcctcgctgtgttgcccaggctagagtgcagtggtacgaccacagctcactgcatcctcgacctcccaggctcaagcgatcctcccacttcagcctctgaagtctctcatatggtgtccaagaaatggtgacaaatctcacaaagggactaggctcagcacggctggaatattcagggaaggtgtcaagaagaaagatgaacttgtgttggcttttgagagatgcataggactcccacaggcagagtgaaataagggcattttagatggacaaacacacagacagaagcagaaatgtgggtggtgtgactggggtatagtgaggggctgctgtggctggaatggagggctgccacaataatggaaatggtaaatgaggcaaataaggttggactggtggcatagcgtcaaggttgccagctttattaaatcactcttccaatatgctagcactggcctgttgggaaaagtaatatatcatgtaatcgaacaaaagacaaacagaggcaagctccaggaatgggcactgtaaacaggacttgccccagagtagccagatgtaggctttagataagttgatgcaggctgagcatctctaatctgagggggaatgtctcacgtggtgtccaagaaatggtgacacatctcacagagggtctaggctcaggagggctagagtatgagacgttccccctcgcctgcgaacttaaaaatgtggccaacaatttttgtaaaagatggctactctgtagtgctttaactggacctatttagacaatgccttacacactggaggacgatactgtgtaaatctaataagtctacaagacaatacttctgtcttttggctctctccttcctctccagggtgatgacaaatccgtgagggtggagattatacctctctcatcatttcagcaccaaggaaataaattagtggcagagtaagggtgacttgatgagtacatccaattgttgacatagttttgggtggagaaattttgctattatatcgacttcttaaaatagtctagtgggattaacttggtttcaattcacagagatctggaagcgaggatcttttaaaaatcctgaaatatacactgcaataaaagaacaaagcatacacctcagccttaaatgactgaagaagtatgtcaagtagcagcaggtgggaaagtggctttggttttcagtttgtgagctctgaatccacacagaaacaggactgcattctgacaacctgaattaattattgtccttaccacaatgaggcagaaaagtataatcaaaatcattagtatttcagtcacaattaatgccaagatgagtttgtcagtatagccatatcctggaacttattttgtgagctaaaaaaaacaaaaaaacaaaacaaaaaaaaacacaccagaatgagagctaactattcaaaaccccagtattccaggtgagtagcttacaggttcttttttatttttttgaaagagggtctcactctgttacccaggctggggtacagtggtgcaatcaccgttcactagactcgacctccctgggctcaggtgaccctcccacctcagcctcccaagtagctgggactacaggcacgtgtcatcaacccagctaatttttttattttttgtggagacaggctttcactatgttggccaagctggtctcaaactcctgacttcaagtaatccacccaccttggcctcccaaagtgctgagattacaggcatgagctaccacccctggcctacagttcatcttgtgccctaatctatatttcactctctacatgagcaaagtgggagatcactgtcatgaccaaagttacatggccaagataagctatggcctgggagtcccagattcttctgtgtgggcactttcctgggatatgctaaatgatgggaaatctgggtctcatgtttctgtgtggtcctcacctcaagcgacttctctttctgttcactctgggcttccgtgctctcattaatgtagttctcagtcttccattggtccgtatcccattctatctcagatgcctttacttcctgctgcccactgagaagcttcatcaggtggcctgtcctggagatgagcttggcacaggtcacttgcacatgggccccagagcagtccatcttcaaggtccggataacatgagaaatgagccttctcacattgttgttggggataagggactgtagctgctgggttagctgaatttcaaactgagcaatgggtaattgaagcttttgggctcgggggacaggtcagtgcccacgttgttgtattcccattttgtctcagtttgtttaacagttggccctaagttgaatgcagtcccagcggaatctgcctcaggaggatgattgtagtttgtgttttcagagatggtgacttctggcatgttagtgttttccataaaaacattttcttccaaggcatttcttgcagttgtgtcttttatattagtggtttctataaaatgttctgaaggagcagatacttccagaaaagggttttcttgaggactcaggtctcctaaggatgaaaaagccccttgtgaaggggaatttatgaggctcttcgctgcagagaacggaggcctgtttgcgagcatcagtctactcagataacttttctttctgaactttggactctttttgaccttgggtgttctgtgggtcatgcggagcgagttttgtgaaagcggtatttttttctggaatgtgaaattggtttagaagccttcatatttgtaactctagcctttgcactttctaaaatggaaatagtgtgtgttgtctttcaatctgtctctcacctgtggtagggcttttgcagggctggaggtagaaggcgcgcccttggagaagggtgtcagcacagagactgctgccttatgctcttggctgaacgaaggcttggtgtagatggcgtttcccgctaacttctcaggcccctgctgtgtgtgaggctgttccagctcccttggggctggactcccgagccttttttcttcggcagcgttctccacagatgcctgggcaccctgttccctcctgatgctctgccttcccacctctttgaagtgccttttctggatgctcattgggcccatgaggactctattcactttttgccggttttggcctacagtttgaatctttgccaggctgtttcctgtggttggcagtttaatgaacggtagtaacattgattccacatctaggtttactgctgagaaatatggcaaatgtaacttagtgcactgataacatcactctcgtcattggtgtctagctgctcactcccaaagcctgacaagttgatgccactgctgtctgagggctcctccggctcaacagtcagctcagtgcttgtgtaattcttccgggcttgtaacatcttcatgaatgctccttctggattccctacagattcttcttcagctgtcaaaaaagagactgctttgctcgtgaaagatgatgggatgggatgcatcagtccatagctgtacaccccagtcacgcagagtaggagtcagcaaacatttgagtgccattcagagaggagacacacacacccaatcctaaacctatgaaatggcaacaacaaaaggagaaaatatatcttttgaaaacacggccatctacttggaacattccatagtgtgacatagagtaactctgcttaggattatttcattgatccccagggtccaattgcccagtgctcagtcaaagcccaaggtggaagacaagtgcttccctgatgagctgatgagctggcctctctgcagactgctccataccctgtgctgtcctgcctcagatgcagagagagcacaaggctcccgctctcctcgtcctcggtgcgcctgtgttcttgctaccatcacagctgaatgcaatgaaaggcggtcctctgagaggagcagggtggagatgctaaagtggaggccccctcccattgctgatagatcctcatctggcatgcgctccaccctccccattctctgctcccacatatcgtagccccatcacagaagatgcgacatggaaaaaagcactgtgtccaccctagttcttaaatttgggcagggatttggggtgtatgttaagagtttttcaaatttgccagattgtatgcctatgttgttaaatacacagtgaatctctggtatgatagcagtttctggataaacattacttgaggtcctaaaatgcagaagggaaaaagcaacttttgtcagatgcctactttgctttcatttcatctctaatattttggatggggaatcagccaaggcttctgactgcaggaaggtcaagtgtgccagtgtgcagctgggtttcttttccagaattaaaagcattttgggtggtggtgagggtcagaggaagaagtaaagattgtgagaaagtggaagaagcatgggcttggggagaacccagaattggggccagaagacctggcactaggctacagcacttagcacctctgatcttgtttttcttcatctgtaaaaggaggttaacaaagcttttctgcccacttcttggggagaagggaataatataattggtaaaaaaaaaaaaaagttttgaaaaataagcaacactgactttatgtaaccaagcattattaattctccaccccatatcactggtagatacctgtattcaagctatctggacatgaaagcagtcacattttagaagtcatgaagttgatgctaataaacctaatctacagaaacactcttgaaagcccttgagcgtttgttctgtgaacagaaaggtttgagattcagagcaagttcagagttggatggtctaagaatggaaaagccctccattctattagaagagccaggtagcaatttctggttatggaaccagaagctctcaggcttcaaataaaacagcatcacttgtactctcataaaactgtaaaaacagaaaaaccgaaaccgtatctacatctgtcctataaggcagagagtacttgagacctcatgaatttaaaaccaccttacaaactacattgcactatatgaagaaattatcactgtgggcaaagcatcaagcagagagcacagtacacagtgtgtggatgttaatgttattctctagccttcccattcctttgtcttggtcctttgtgcatatggaacagttctattattaaattttgtaatagtaactgagaacctgactctcagcaagggagtagttcagaaattgagggagtttaactctgaatgagtaaataaaaataaagcaattatgtcattagcttaaaattttatcatcattaaaaataaaaagtttaaaaacaaatacttaatgtaacaatttatcaccgcgcaatttggactcacgacaatgtatggtgtttgtcagacatgcactgttgcaatgcagcttgactgtcttgcagacagcctcaatgctgtttttaagttggcagaggcagcaggccatatggctaggtaagatcctatagatgaaaacagagagcaataaattagcggtaaagcggttacttgagtaggtaaaggaggcagccaacgctaccacaggtgtgggaaaaaggtgtcattgaagcctatggactggacagttgggtaggaaccagaaggccaataggaaggagggcaaaggtgcccaactgaagggtaagcatggcagtgagtatggtatgcctagaataaagatggttgggattagaattgggtgacagtgattagtagtttaattcagaagtatctcttcccaactcaaaagtctcactttgggctgaaagtacagaggaagaaggtagacttttaagaagtctgaataagcccccaacttctggagtccctttctcaattcctgttgggagtgggaaatattataaattactctgggcattaaaaatagcttagtttaacctcgattgtggagttaaaaaataacaaagattgcattggtcaaatctggacaatttgagcattcaaaagaataacaacaataagttacaacatatttaatataaagaagaatccacgaagagtgatatagaaaaagaaagagggggagttcttcttcaatgaaataatgccagctagtaaatgtagaaggaatgacagaatttttaaaattgtcactttgcaaccatcagtgtaatacaaattcattcagacaaggattatcactgatgcacatttgggtgaaaagacatttgagaacaggatcttcactgaactcaaagtaacaacccacagattatttattaattaccaagcggaaaattattattttttatttttattttgtcacccaggctgaaatacagtggcaaaattatacctcattgca

SEQ ID NO: 7305 - DNA, 441 bp, Homo Sapiens
  XM_374461
atgactcttcaatttgcatatgttataaataatatcaatataaaagcttatagcatggatctaaagcttaaggactatggagtggatctcattgaagtttcagacaatggatgtggggtagaagaagaaaactttgaaggcttaactctgaaacatcacacatgtaagattcaagagtttgccgacctaactgaggttgaaactttcggctttcagggggaagctctgagctcactgtgtgcactgagcgatgtcaccatttctacctgccacgcatcggcgaaggttgggactcgactggtgtttgatcactatgggaaaatcatccagaaaaccccctacccccaccccagagggatgacagtcagcgtgaagcagttattttctacactacctgtgcgccataaggaatttcaaaggaatattaagaaggtacagtaa

SEQ ID NO: 7306 - DNA, 630 bp, Homo Sapiens
  XM_374766
atgccatacttgccccactgtggcatgatggttgtctgtattgtcccgattgagaatctgaggctccaccgtctggtgccacagcctgaggtgatgaaaatccttgcagatgcatccagtgggaaagatatggagttaccagtaaggagctccaccgtgactctcctccctgctccgttgccccgacgaggaagtgtgaaaacgtttctggctccatccaagagttacttccctgaagaagagagggctttgttgaagtcttcccatgctttctgcacagggctctggccttggagaagggatttccagttaccgcagtgtcacttggccctgggtctcctcccgggagagagaagtgtacggctcccaaggttcctggcagttttgaaagagctctcagccacagccagctttactttggcaagtgaggccatcccctttctttcctcctttcctttcccatggaacctactccttccatctgtctttcaagctctgcctcagaaatggcaattcaaggctgattttctccttgaatgcactctctctgtgaaagaggcttttcaccaagaatgtggtgctggtgtttctcttgccaatgggctaaacaaaggcctccgcaccgggtaa

SEQ ID NO: 7307 - DNA, 5244 bp, Homo Sapiens
  XM_375152
acagctacctggtaggtgactggaggtgttgatcagtgcttggtgggattttgctgatgtggccccaagcccgcctccctccccaccctgcgatggcagaagaaactcgacaaagtaaattggcagcagccaagagaaagttaaaagaatattggcagagaaacagccctggtgttccagcaggagccaagaggaacaggaaaacaaatggcagcatccatgagacagccacttctggtggttgccactcacctggagattcagcaacaggtatccacggggagagccctacatcatctgctaccctgaaggatctggagagcccgtgccaagaactagcagtagtcccagactcgaggtccgtaaaagtcagtcaactgaagaacaccatcaaatctttgaaacaacagaagaaacaagtggaacatcagctggaagaagtaacatgatttctttgtttgctcgcgacatgactgctcggtttgggggacactcagatgtagaggccccgagtctcgtctcacccactcccagcctggggaagaaggctcaccccccagagtccaccccatcccccacagggtccctgataacccggtcccatgggtgggcctgtcccggggcaggggcagtggtggcattctggggacatgtctcttgcagtaccatctctgcctccgcctggttagatctctgtcttcctcttcctacaggaaaagaaagcaaacaacgagaaacagaaagctgaaagggggctagaggttcaaatccagagattgaacatacagaaagggaaactaaatacggacctgtaccacacgaaacgttctctcagatactttgaagaagagtccaaggatctggccgtccgtctgcaacattcattgcagcgtaaaggagagttagagcgggctctctctgctgtcaccgccacacagaagaagaaggcggagaggcagttctccagccgcagtaaagcacgtatggagtggaagttagagcagtccatgcgggagcaggcactgctgaaagcgcagctgacacagttgaaggagtcacttaaagaagtccagctagagagggatgaatatgctgaacatctaaaaggagagagggcccggtggcagcagaggatgagaaaaatgtcgcaggaggtttgctcgttgaagaaggagaagaagcatgataaatatcgggtagagacgctggagaggagcttgtccaaactcaaacaccagatggctgaacccttgcccccagagcccccagcagtgccctctgaggtggagctgcagcacctgaggaaggaactagagagagtggcaggagcgctccaggcccaggtggagtacaatcagcgcataagtctcctgaatgaggggcaaaaggagagacttcgggagcaggaggagaggcttcaggagcagcaggagaggcttcgggagcaggaggagaggcttcagcagctggccgagccacagaacagcttcaaggagctgaacaatgagaacaagagcgtactacagttggagcagcaagtaaaggagctgcaggagaagctaggcaaggtgaaggagacggagcgcctggaagctgccagccagcagaaacagcagctaacggcccagttgagcctcatggctctccctggggaaggacacggaggagaacatctggacagtgagggggaggaggcacctcggcccatgccgagtgtcccacaggacctggagagcagggaggccatgagcggctttatggaccacctggaggagaaggcagacctgagtgagctggtggagaaagaagaacttggattcttccagtactacagagagagatgccatcagaaagtttatcaccctataacaaagccagggggcagtgccaaagatgcagcaccgggaggaggacaccatcaggctggccctggacagggaggagatgaaggtgaagctgctggagctgcaggagatggtgttgcagctggtggcgactacaagggacacagcaaattcttggtgactgcccagaaccctgctcatgagcccagtccaggagccccagccccccaggagcttggggctgcccacaagcatggtgatctttgtgaggtgagcctcactgacagcgtggagcctgtgcaaggagagaccagggagggttctccccacgacaagcctactgcacagccgatcgtgcaggaccaccaggagcacccaggcttgggcagcaactgctgtgtgccattcttttgctgggcttggccgccaagaagaaggagataaacatgaccatcgtcaaagagctgctcaagaaatttttaaaaaagaaacaaagttatggggttaatctcctacacaattcatttacttcgtttgaatgttatagccacttatgattatttgtgtttctaatttatagtttaagtttatttgtaaatagttaaaagagagtgggtctctgtggctttcactgatgttcactctggcatactttcgcaattttctttttcaatttcatgattgtaggttattagcatgcatattgagtttgcccttacgtggtgggagttcaaacacacaaagacccactatttgcacaaaactattcttgctggtttggaataggctgccatgtgtttttaatgttattgcagcatgtatattcattacagaattcagataaaatttgcctatgttctgctattgtttgatctaatcttaatcacagtgagctcttcattagcacaatatgtggtttgccccaagtgtgcactatttaatactttgtaatatgccaccaagagtactgacatttagagttgtttaaaggccgagaactggaaacagcctttccctcattttctgtgtattggtgatgggagtaataacattttgggggagctttttaaatttcacagaagaggaaagttgcctgctctggcaggtatgtgcaagatagagtgtgtttcatttgttctgttgccaagaattagtgctgtactattgtagttcctttaggatttgtatgtgctctgggctcatgaagatattgcatcatgagctgcagcagttgtactcttttttgatgacctaaaaagggcttatttctgaggaatgaaaggttcccatcattgactatggatgtggaaaacctttcctagcttagagcatttgtatctatattttaaagtcagagttcatgttacctgttttaatcacatgactgcatgtcccagtacacaaaagggcactggttggcattcttcttaatgtatttagtaaagatcagaagaaatcctttaagagtttaaatgtccctggaacacgcatacaggctctagtcaagaatgaattagagtgaaggaaagctgtgtgacacctggcattcctctgttcatggagcttctttgaggcttgaagattgattttaccatctagaccactctgcctattcttcaaccaccttggttactttgacataggaattgacttcttttccttgaatggaaaacactttgaaataataataaacattgttataaactaatatatgtgagagtgcttagttgaaacaaaaaggagttttagtagacagtattatactatctttgaaaatcaaggagaagtttatgcaacttaaaatgtgtacaaactgcagtgcaatctactgttggtgaatgtcagtgtattatcaggaaacatgtctatacaatcacagagttatatttcctcacaaacttctttgtgaagagtgaaatgtgtttctgtacctctgggtttcacttacgggcatattttgtgcagtagttatgtgattgtgcctatgcatgatgaatgaatgaatttcagttgtacattgcctaaatcataacttgatgatgcttgggaaagactcaacagttaaaacttcatgaagttctaatgtctgtgttccaaaacacatcacattattaggatgtagggagatatgtatgtgtgctccctggggtggggatttctagttactagaccatctccatttttagcatttggcatcctcatgatacttttataaatacgacattaacaggagagcagcagtacgattttgccgatggaataacagatttgccggcaatcactgaaagagtgcaaatatcgggtccttgtgacttcaacggactcttccaaattgtatgaatgtatcaatgtattagataaacccagtttcagaatgataaagaaaaaatgttagaccaaataatgcggctagttaacagtggtacgatttctagcccgtggctttaaaatgcacttaaagtcctgtccttgccttttattttctgaacttgatgtttttgcattctttgagttcagtttaaagacaactacgagcatctgtaaccaatctgacaataatgtgttcatcaggtgcctatggattaaatcacatactggcatatttaagctgaatgtcaatctggaaaataaattgactgtattaacagaaataccactctttgtgtagatatttgtcgtatatttaagaaaaagctaaaaagaatggaaatcgcatgactataacttaagtctttcttcaaagtgcatgcagtcttttgcgatacctcattcagccaagtattggtattcttcctcattcggtataaggcagctttcaatttgcttagaaggcaacattggaaggttagagttcatcagaaacagaattctaaaatgtgagttcaattcaataaatttgaatttctgtaggaagaatcaaatcaccgatttaaagagtgcaatatataataatcatttttaaagtattggattaaatctgataggttttccagaaatgaacaaaaatcagctctaaaaccaaagctgatttttagaaaatttgaaaatgtaaatcagccctatccatactatagtttctctaaaactttatctgaaagagtcattttaaaataactattaaacaatgtaactgctatcttaatgttctgaaataagttaaaacattttaaaatatgaatactgtaaaggaaataaatggtgggaaggaaaagtagagaaagaaatgccaattccagtccaaagctttatttgccaagttttcttagaatgaattttaccaatttatgaattcttgtaagcggaatgtaaaacggaaatactgaaagacttttgcctaaagtggcattattgactgctggtgtgatgatactgtaatgtaataaattattaagttgttgca

SEQ ID NO: 7308 - DNA, 3902 bp, Homo Sapiens
  XM_375646
atggctagcttgctctttgacatctgcggtctattgacattcagggatgtggccatagaattctctcaggaggagtggaaatgcctggaccctgctcagaggactctatacagggacgtgatgctggagaattataggaacctggtctccctgggtatctcttccaaatgcacaatgaaggagttctcatcaacagcacaaggcaatacagaagtgatccacacagggacattgcaaagacatgaacgtcatcacattggagatttttccttccaggaaattgagaaagatattcataactttgagtttcagtggcaagaagatgaaagaaatggccatgaagcacccatgacaaaaatcaaaaaattgatgggtagtacagagcaatatgatcacaggcatgctggaaacaagcctattaaatatcagcttggatcaagctttcattcacatctgtctgaactccacatatttcagcccaaagggaaaattaataatcaagtggagaagtctatcaacgatgcttcctcggtttcaacagcccaaagaatttcttgtaggcccaaaacccatatatctaataactatggggataattttctgaattattcattactcacacaaagacaggaagtacgcatgagagaaaaatctttccaatgtattgagagtggcaaagcctttaattatagctcactcttaaggaaacatcagattattcatctaggagagaaacaatataaatgtgatgtatgtgacaaggtctttattcggaagcgataccttgcacgccatcgtagatgtcacactggtgagaaaccttacaagtgtaatgagtgtggcaagtccttcagtcagatgtcatcccttacatatcatcatcgacttcatactggagagaaaccttacaaatgtgaagaatgtgacaaagctttcagacacaattcagcccttcaaagacataggagaattcatactggagagaaaccacataagtgtaatgagtgtggcaagacctttagtcagaagtcataccttgcatgccatcgtagcattcatactggaaagaaaccttacgaatgtgaagaatgtgacaaagctttcagtttcaaatcaaaccttgaaagtcataggataactcatactggagagaaaccatacaagtgtaatgattgtggcaagaccttcagtcatatgtcaacccttacatgccatcgtagacttcatactggagagaaaccttacaagtgtgaagaatgtgatgaagctttccgtttcaaatcaagtcttgaaagacataggagaattcataatggagagaaactgtacaaatgtaatgagtgtggcaagaccttcagtcaggagttatcccttacctgccattgtagacttcatagtggagagaaaccttgcaagtgtggagaatgtgacaaggcttacagtttcaaataaaatcttgaaatacgtcagaaaattcatactggagagaaatgttataagtgtaatgattgtggcaagatcttcagtcatacgtcatccattgtataccatcataaatttcatagtggagagaaaccttacaaatgtgaagaatgtgatgaagctttcagtttcaaatcaaaccttgaaagacataggagaattcacactggtgagaaaccttacaggtgtaataggtgtggcaagaccttcagtcatacatcatcccttacatgccatcatagacttcatactggagagaaaccttacaaatgtgaagaatgtgatgaaactttcagatacaaatcaaatcttgaaagacataggagaattcataatggagagaaaccgtacaagtgtaatgagtgtggcaagaccttcagtcagaagtcatgccttacacgccatcatagacttcatactggaaataaatcttataagtgtaatgagtgtggcaagaccttcaatactggagagaaaccttagaagtgcaatgagtgtggcaaaacctttcataggcagtcagcgcttatttaccatcaagcaatccatggcagagggaaactttacaaatgtaatgattgtcaccacgtcttcagtaatgctacaactattgcaaatcattggagaatccataataaagagagaccttacaagtgtgataaatgtgacaaatttttcagacatcgttcataccttgcagttcacgggcgaactcatgctggagagaaaccttacaaatgtgaagaatgtgataaagctttcagattcaaatcaaaccttgaaagtcataggagaattcatactagagagaaaccttacaagtgtaatgagtgtggtaagatgttcagtcaaaattcggcccttgtaattcataaggcaattcatactggagagaaaccttacaagtgtaatgaatgtggcaaggtttttaatcgcaaagcaaagcttgcatgtcatcatagacttcatactggagagaacgcttgcaagtgtaataaatgtggcgaggtttttaatcaacaagcacaccttgcacgtcatcatagaactcatactggagagaaacattacaagtgtaatgagtgtggcaagacctactctcacaattcagtccttgtaattcataagacaattcacactggggagaaaccttacaagtgtaatgagtgtggcaaaaccttccatcacaattcagtccttgtaattcataaaacaattcatactggagagaaacaagcgtaatgaatgtggcgaggttttcaatcaacaagcacacgttgcacgtcatcatagaattcatactggagagaaaccttagaaatgtgaagaatacaggagaattcatactggagagaaaccataaaaatgtaagagtttttgacaaggctttcggacgtgattcacacctggcacaacatcccagagttcacactggagagaaaccttacaagtgtaatgagtgtgtcaaagcctttagtgggcataatgctacaaccattgtaaatcactggagaagccataatgaagagagatcttacaaatgtaataattgtggcaaatttttcagacatcgttcatacattgccgttcattggcgaactcatgctggagagaaatcttacaatgtcatgattgtggcaaggtcttcagtcaagcttcatcttttgcaaaacaggagaattcatacaggagagaaacctcacaagtgtgatgatcgtggcaaagcctttacttcacattctcacctcattagacatcagagaatccatactggacagaaatcttacaaatgtcatcagtgtggcaaggtcttcagtccgacttcactccttgcagaatatcagaaaattcatttttcaggtaattgttcccaatgcaatgaatatagcaaaccatcaagcattgattgacattagagtcagttcagcattgacttgagtttgagttgacttaacattgagttcaagccttaattgacattaaagtgtttatgttaagaggactgggctgtgtggcatggctcacgcctgtaatcccagcactttggtaggccaaggtgggtaaatcacttgaggtcaggagtttgagatcagcctggacaacagacctgagccacttttcccagcctgttttttgtttctttaacaaaaactgatagggatttttatgggtatcgtattgaatctagattacattgggttatataatcatttaacatattaatttttccaaaccatcaatatgggttgtgtctctatatatgtttttaatcattttgatcaatttttgttgatttcaaggtacaaacgtctcacctttttacgtttattcctaagtatttcttattttaagttctccagcaaatggaagtgtgttaaaattttcttttaaaattgtttattattaaaatatggaaattc

SEQ ID NO: 7309 - DNA, 1675 bp, Homo Sapiens
  XM_377476
atgaacgcggcagagataacggacaagctcggcctccattccctccgctacagaaactggcacattcaggctacttgtgccactactggacatgggctttacgaaggcctgaactggctcgccaaccagttccagaaccagaactgatcagaaggatctattctttgtgccttgtggccacatcagctagcctctgctgtgtgcacgtgtacgtgtgtgctgggagtggaggcagctttctcacagtgccttatccatgccataagaaaagcagtgttacattttaagaaacccagtgttaagttttaaacaccaccttccatttcagtagctttgatgatcatttttgcaattgatggagaagtccagagggcttgctggtgctcgaaggccagagcgggcttcatggaggcgagttggagcggggactgagttcagctgttgcaatcctggtctggcgtctggagtcctgttagtctttggcatcctttcgtaaaaaggaaggaattgtcattcttttttttttaaaaccatatttttactgtaccttttcatgtttatttattttttattaaaaaaattttttttgaaacagcctcccactctgtcgcccaagctggagtgcagtggtgcgatctcagctcactgcaacctccgtctctcgggctcaagcaatcctcccacctcagccccctgagtagctgagactatgggtgtgcaccaccacacctggctaatttttgtattttttgtggagacagggtcttgccatgttgcccaggctggtctgtaactcctgagctcaagggatccacccacctcagccttccaaaatgctgggattacaggcatgagccactgcgctaccgagaaatcgtcattctttaccaccactgctgcagctagcagctcactcttcagtgctttaagcaaatgatcctcaggaaagaaaaggtatttgcttattgcaggtgcaaagaggctcagattggaacttttccctgaaactatattgtagcccagagttcctgatgtaagacgctttatttaaagacatccgtgagctttttcactggcatatcaatacttcataacactaggaaggtatccagccttttccttatgctagttccttcccttatttgccagatggggaccctgtggggaggtgacccagtgtgaggccgaagctctttcccagagccccacaggccagtggagggtcgtgtttgtgctctgggcatcaccgtcttgggtctcggtcccctgcgactgcagctgctacatccctccctgctctgagataaatgttcttcccatgaagcagacggttcacttttgggatggcgctgtctccaggtttggctgtctcagtccagatgatgtttggttagtttccattcccagaaccacaagcctttgagttctgaaagtttgtgacagaatcaagaggctaatttgggagatgtgagattcccagcccacctggtattgccctcgagttagtggtaaattttgctatggaaaatatctcttgtcaagaccaagctccggcgcattgcctccctcttttggatggccatggcatctcatgaaccacttggaaatgtgttttatgttgttctccaaatattaataaaaatatcccggagaggaggttcactaagtagcctag

SEQ ID NO: 7310 - DNA, 3340 bp, Homo Sapiens
  XM_378421
gaagttaagtgatgtccctgtttgcagtgtcaatgagattgagggcttgggcttgaacccaaccttctccctccaaatagcctgctctttctgttatgtcatgtttcatatacaagtttgggagcctccagccctgactatcccaacatatacaacataatgtatatgttgtctttggaaatatcttctgtgaaggccaagcatttaatattacaggaaaccttgaagtggatatggaagcttggcagccagcttggatcttcctaagagcctctttccttcataccatcttcagattgttattccgtgacatcttatctacttaagcagctaacccatgaggcatccaaaacagagagaaaaaacagagtgaacattttgccttatggaattgtcaaaagttgcggtcgaaacacaggcaagatttggaagaatctgtaatgagccagggccagttttcctagttatagagcctaggctggaggaggtacatgggctggggaaggagagggaattagagattggctgttcctggaaactctctgcctgtactccatggcctgagtcccaggacctggaagcggctgaaaatctgagatatagaagagactggtgctgcctttctggggagggcttgggaaaacagcaagttccctgaatttttccatggcacaggagcagatgaaatgtcatgattggtgtccaggctagtggactgagttaactcccgagagtccctgtactctccagcatggcacgaggagaagcaaaccattttcctatgcagccataggaaaacggtacaaacacgacactgaaattcagctgaccgcaagagcttgatggtcagtgtgagccagatggagcaggaacatgtatggatggaaaacccagatccaaagttcatccccctctcccgtggatgctccagcacattgcaaggtttcccagaaacttagaggcaaccttggcacaaggacatgatttgttggaaattaagttttgtcacctgggggactgcgagcttgatacggaaattaattcagttatataattataaaaatgatgcactttctacacatctgattttgtgaacccaaattagtttccacaacgcaactgtgttaacatttgccaacctctggggcaacattggttgtctttgttgcttttttctagaagttttcagctcaaactcatctttcccttttttattttcatttctaaattctggtgagtggtgttttgataagtagatatcagctatttcctgtcttacttgaaaagtcttctctgtattaaataacaaaggtcacttagataaatatcttctcattaccagagggtagggaactgcttctcctatacataacttctattatctttcaatccagaaaaaaaaacgtggcaggaggacaagtttttgaatgttatgaatcgtgatttctgtgtctaaaatctgctcttttgttaacactaagggcaacttccttcaaagtggttcatcttggtctattactgtgtttgtgtgtgtgtgtgtgtgtgtgtgtgtgtgtgtgtgtgtgtgtagtaaaaccaaagtttcctattatttttgaaggtatttggccctgctggaagacagctatgtataagttgaacttggcagagagaaagggaaaccagatcttactcccaggcctcctgtcaccagctgtgtgactttgctgaagtcatttctttcccctaagtctcagttccaatacctataaagtgagtgttctgcctgtgtgtgttttaggtctttattaatgttgaaatgtcctgactttatgggttctcattcactgtgatgtggtaaccaaaacaagcagagattaataaccaggactcaataatgtaaaacactaaaaattatatttttgcaaatttttgtaaacgcgggatcatatctctctcagtgacagtattggtgtgatccattattgtacatttagtggataaacagaatgtaactaagaagtgttatctttgttatcaggggaacgtggagttggatgtgtatgatggggatgggcagttaattcataggttaaacactcaacgagggaatatctctttatcgctatctccaaagactccccactcttcctcaattttcttagtaactcactgctcagacttagtttccccagaagcagactatgagaccaggatttgatgcaagcagtttttttggagttgatctcagaaaggctaagagagtagagaagtaatacagagaagtgaagaaagctaatagaaggtcccggtgctctctcctgaaagagagcgctggaagactgagtagaacatgccccagagttgtccccctctgctggggcaagagaactagggtactgatcagctaatttccgtgcttcactggttaagggcattaacctccccaaacttctggcctgtgccccagatagaccaggcatgcttctgtggccagagaaagcccgaggatggagagtcacagatgcttgtggtaggtagcaggtggtgtgtatggaaatgggaatgggatgccaaggggatttgggcagggcaccaagcatctgccgcattaccctaatccaggcaataacactcacagtatcccagggattccccttctagcctcgaattcctcttattctcatttattttgtatttactttctagaccatagtttctcagatagtaaaggttctactgactttcctcatctctctgcaacctctttcctgcctagcttctcttccatggtcaagccaatacacacagaattttgccttccattcttcactcaggtgtttcttccacttggaatctgttcctcagtcattttcactaatccatgtccctcccagtacacagaatttttcacagaaaacatagttaatcctttaaaaatatatttagattgacttgcatgcccctcttaaggttttttctttccaaatgccttttttaaaaccccaatttaagaatttctttagccaatactacaacaatgcagtccttgttctccacttctttccttttatctactcaatgttattaatctttttagtgtaaacatcagtaactcaatcgagccttttctgatccccatgattaggatgagtttttgtgttgcctactccaaaaggtctgtcctttttaatgctcaccacacttgaggtttctgttcacacttcaaaggctgtggggcccgataccatgattttgctgcactcctagacctggcctactggtacatagtaggcattgataaaaatttgctggagcattgcataaataaactatgccatttggggctgattaacatttt

SEQ ID NO: 7311 - DNA, 1542 bp, Homo Sapiens
  XM_378454
gagacagcaagaccaacaaccccttctcttcctcttcagcctactcagtgtgaagatgattgctgccctcagctgtgcctggagcacagggcacctccagttcggcctctccagaagtaaacttgtcttctgcctatcttgtgtttgttgggaggaggtgacctgggactctactactattgatgaagaatccgaaaaagtcttctattagccctgtgccacaccctacctatgagaaatcagtgtttactgcagagaacacagaagccagcaagcagcagggaagggaggcgaaccaatgcagcagcccaccgggaccgaggaggacacacgcagagcaagtcacaggaagcgcagctgaaaacaaatggacgcttatcccaaatgcacaggacacttaccaagaactgatggtccgtcaaagtaaagctcaacagctttggctggcaggacagtcaaacttttggacgacagaaagtaacagtgggaaatgggacaacatctgccagcaacgcgagaggccaagaccatggctgctacaggaggggtcagcgtcacagtacacgcatggcggcggttgcacatgcatgcctggggaatgtgagtgttcagacatgccaggagtccagcctcaccaggaaacaggcacacggggacagaggcgcaaacactgaaaactctcgctgaatccactcggctgagcggtggtcacgagagcacggccctgcgctccccacaaaactgcacctgggccccagggcgagacaggcgtggaaggtgcaggggtgtgtgtgggggcaggggctcctggctcagagccgtatccaggaaccccccttcaggctggagccctgccctgagccccctgtggagagactgtggagagccccctgtggagagggtgactgtgggagagcagcatcaggcctagtctcggctgtgaagtaccccccacctccacgcaggatcccggggattctgtcaaggtgggggccgcctgctcagcccaggctccctgaacgtgtggctagctgagtttgcggaagaaaccaggagagtgccaacaccaggcttgcaagcaagaggctccctgactgcctgatcctggagcgcaccccatcctccctgtgttccctgggcctcagctgttccccagtgaccttggagacaccctgccccaccctggctccacaggagccctgcccatcaccgcctcagctctgagtctcccctggggacacaaccttcctcctggtgcagaggcgcaggatgctgcccctaaggcccatcttcctctgcagcatgttttgatgtcagctcattcacaggaaagaaacaatcacatctcagtgcccagaatggggaccaataggagaggtcactgggaataaagcccacacgcaccccagggtccatgggctccccagaaatgcaggtggcctccgccagagccaacaagcctaagttgctgatcagcccctccctgcttccctgtgtggaagaggaaacagaggcccagactagtagggctctgccgtggtg

SEQ ID NO: 7312 - DNA, 2088 bp, Homo Sapiens
  XM_379123
atgaccggggagccggtccacgtggggcgggacagccccctccctgcggcctcgccctggagtctcggcaccgtctggccccgccggctgattacagccagagatcgagggggacctcgctgtccccctagaggccgtcatgcggggttacagaggctgcgaccaaagtcattcctagctcctctctcggggctccggaaagccgtccgcgcctccagccgcactttcagcgcacgcaggacctgccgcgcccggtggccacacccgtccctctgccgggtgacgctgcgggagatcttgcgccctggggctccggatccagttctggcacgttgttgcacctgtgacttgtccttggcctggcactgtccctcgcctgggggaagcgggggggtgggggggggatgctcacgtggtcgctttgctcccgcagtcatgcacttgggtgaaaacagactgaagagtcacgggaaccagcttgtctccccagttatggcgcagagctgcaaggatggctgtgggtcattaatttctccgtggctgacctgtgtttgtaacgccgcagctgttgcgagggggaaggacactgcttcggattcaaattctgactccttgctgcagtgtgtcaccttgagccagtcccagatctctgcgttctcacaattgtaaaatgttaacagaggctgcctaccttgtggctggaattaaatgaattaacgtgtgtgaatgtgactagaattcagtacatgttcaggaaaagctgatttccgctttgctgttaccgtgaatattactgttttagggtgtagaaaagggtggaaggggatgttattgcatcctggaagcttatccttttgaggtaaagattgatttctggtcccctgcgtggtatatagtgtagttttgacattatttagatgtgttatgcacatttgggtgttgattatatggcttacgatcaagactaaccagtcatgccgtgggagattaaggtcgtggtctcttgtcaggattgtagtgagatttaaaaattccagccagaaataccaggcttagaatgctctgaagccctccccacatttttgccatctctagcaggagggcactgcatagcagaaacaaagacgttgtaaattgttgctgcctgagtcatttatagaggcttaaacaacctgaatgtcctctgacctacctgtaacatttgatggagttgtatgagtaacttacaaagctgtaggtcccaaggtcggtctgaaaaagaaagttcatatccgggagcactgaccccgtagtgtaatcctggcaccttaaaacgtactgctccctccaccttcacttcaaggttatgaaaacattgagtaaaagggatgatctgttcaaagtccttagtgttctgccaatttaaaacagtaattttcaaagcagttatttgcaaggaaattgcctagaacttctcccagtgtgcggttgttttgtgtgtttgtgtgtgtgttttgtttgtttgttttcagtctgtccacaggcgtacttttataggtctgtgatagtaggtagctcttcaagttggcaaacacctgctggacaacccctgagagattcatctgagtgagagagcactctccagccccatcggagtgggtttgcagggaaatcataaggaagaaatccttatctttccaacactgagatgcttctgccgaagagtagaatgggagtgaggggacacgcaaaacgggctgctgccggaggaagaggaacagtgttgtggctcatgccatatgaatgggctcactggcctggcccagaccctgactgcccacaggatctttgacagagaaacggaggcacagagaaggaagcggcagttaaagctgcgaagaacctaacaaatttcaagattgtaagtgccttttcccaggatgccagcaagtactgagcctgtattttgagctgcatcaaaccctgttggaataaaaaaggacatttctaggagatcagtcttcgagattggccccagtttccccagagtaggaagaggcaggaagccagagcacatgttctctccagaaataaagttgttgcagtggc

SEQ ID NO: 7313 - DNA, 7068 bp, Homo Sapiens
  XM_379215
ctgggatcgcatctggagactgcctagtattctgccagcttcggaaagggagggaaagcaagcctggcagaggcacccattccattcccagcttgctccgtagctggtgattggaagacactctgcgacagtgttcagtccctgggcgggaaagcctccttccaggattcttcctcacctggggctacttcttccccaaaaggcatcatggctgccctcagatcccttgtgaagcccaagatcgtcaaaaagagaaccaagaaattcatccggcaccagtcagaccgatatgtcaaaatcaagatgagaagaataatgtctggggtgaaggtgaagcacccagcccaagactcagcagccaggaagtggcccagcgctctttataccacgggtgcaggaattcacacagaaaagtggaggccaaggcgtgagaattcctcaatgactgccctctaaaggaagagatccaaagaaatcctgaggaagcacaacaaacaaaaacactctggatcagaacttcctgtgccagcgttacatcagggttttctagcagcaagggcgggctccacatggctgaagcaggcaaccaggaggtaggcagggcccggccctgaggggctgagttgggggagtcccaggtctcgggaagagtgatctcaggctgccctgcaggtgttcctgggggatcctgggacagcatcagggacgctggcccccagtgcttccttcccatctcacaaatgggcatttgttcatcggctaaacaacactttctagactatttggggcactgcacatgaagtctgcagggtcgggggttcatgatcaggctgtctctctctcacatagtttggtaaatacaggactgttcctaaacagcaatgagacaacctggtgcacagttccacatatcgagacctgtcatcttattcagatcatatgggtgataccacatgcttcagagtgaggctgagcatgggttcccctaaacttacacagacaaaatgacttacagtgtttgccggccctccgtgccctccatgccctctctgagtcaccagcaaacattctgtgccctgaactagagaatcatcacattgtctttgccccagttactttcctggaacagataacaagcaaacctctctctggttagttgcttctcggctgaatggttagggatcctgtgctgaggtcaggtctgcaggggtgagaacctgatccgacagtgggacagcaggaggccatggggggatctgaggcagggaaggtgctcaggagaggacctgagaaggaagagatggctgtggtcctggaggctcagggatcaggcctagggcctgtgttccttcggcctcagcatacctctgaagcggtatgcccagcttctctgggcaggccctacaatgtgtgagaaacagcctcagaacaccacctcttttcagggtagttacccaaaatacacacgtgggagtttgccagagttgaggcagcttttaaaggtggagcttttcaaaaagggaaactgggagcacttacagcccaggtctatgttactggtaagaagtggtttgtctcaggaataatgtaccctgtggagagtactttgtgtcagcctcactgagaacaaaaaaagcactcctttccccatgattaacactcatgtgtcaggaaagtacagtcaatgtatgctaaaaatccacttgaacaattagctcgcttttttccctcatttgctttcagagtaaatgtgctttcagagtattaggtcggcctaatatatgatacattttaagaaggggaggaaagcgcattgtataccctgatgctgggacccaatagaagacaggccccctggctggcctttggttctccctggagctgacaaagggaaggggcttggaaagcagccactgtccccgcctagtttgggcctttacagacacacctttccttttggcagctgctatggcacggattctctatgccagcacgaagctggaaaacctgcctacctggctggtgaaatgagggtggcagctggaggaaacaggcatcttaggagactagaaatgtccttcaaagggacttcagtgagtgctcaggggaccaggggtgactgtgttaagaagggttagaggttgagagggagccatgagcttgggtcatcaccccagtgagaccatccaggcacacagctcccaggcttgggaggccgcctccagtccaccaggaccctcagggagctgtgacttcattgaagctgggtctaaaggcttccttcaaggctcagcaaactgggttttcaaagatttttgatccctgaagctaatttacacgttatgtggggccatggcaaagacttggccctgaagtggacagaaagaggctgtgctgagtgatgaatgagactaaacagtgttctcatgcttggtgattttgatgagaacatactacataagagttaagagcattataattccctttatcaccatataaacatgtcacttatccggaaagcatacaatttatttgtacatgagaatgtaaatttaaaaattttctgaaaactagattaaatcttgagaagcaattttcaagtaaacaaaaacatgccatgttaatcagcactagatctcccccaccccccacataatgtgtatgtacacatttctcaaattcagactgcagtacagctgtctccttggaggcgtcaggggttcctaagcctaaattctacctctagggtcttgatccctcaagagttcatcctgagttaaaattttgttatccccggaagcagagatgcactgactctggtgatctcagtatgaatgtggtatgaaatcttctaggtgtctgtggtggggcctgagggagggtaggaaaggtgacgaggaaaaagtagagggagcctgaacaccctgggtctcaggtacggagtgaagaaatcactaaggtgaaaagacaggctggggcccaggagctcgtccaagtcctgatgaacaacaagtcctgggcaacatcacaggccaccaaacacaccttcagctccagggtcgaatagatggtggaagagcacagccatctggaaaatcagaaaaaagtggggaagattttctatcttgaacttgtgagctggagaattaccattagtagcccactaataggttatggccgatgagtcccttcataacacactgagagccacttttgacactcccagaaaaggcaggttaacaaaaccccttgatggaaggaagaccctcattgcccaatgtacccaagcctctttgaaccttgcttagactgaactgcaaatgtcttgactgctctgggctccttagtgcaactccttcccacagaagccatcaggagcctggtccaggaagctcctctcctacacctgccttaaaaggcccagctctgctggggagtaaggttcatgggggccgtcccaatgcaaaagggaatctctgccatcacccactgcaaccacatggtagccactctgcagccggcaggcgtgaggcatgctgcgctaacatgggagggcggaggctctgcctgacttcccagaagcccagtgagaagtccaggacaatcagcaggtgctatgggaaccttggctggcaggcaccatgtcgtcctgtatgatcggcaggaccggctccttcctgaagacaccgattcttggcggctcctgacaaggattgagaggatttgtgggggacagccctgaagccctgagccctcaactcaatgaagggattgtgctggtgtagacccacagccatccagctctgtcactgatgaaggtctgaactgccatactctgcccctttggtgtcagccttaaaggtcagttttaggtgagtttcaaccagtggctgtagatgggtcctttgtttaccagtttccccacatcctgtctgagaccattgctagtttttgtctgcaccagtcttagggaaaacaacctggacaccgtgggtgagatcaccagtgggctccaagccagagcatgggcctgggacagggtgggttaccttggcatactctaacatactcaaacctcatttcttttggggtgatcagacccaacagcaggtcatgggggcgacgaagtccagtggagtccaaggaatgagaaagacagtttgagagacaaaatgggaccagggggctatcacaagtgtggaggctgcaacaaacaggtggtgaggatgtgggggttgaaaggaaacggtgtatcaagtgaatgagaaacatatggctacttgagaacatgggaatgctagaagcaaggagcagcaagtctagcaaacatgcaagccctgcctcagcttctctcccaacactcagcttttcttccaacacatttcatgtgcaaggttctcgtgcccactcctcttgtacagtttggcagcctcatggagcttccctggtaggaaaacacatctgccagaaacaggtcattgttggtctctccccgcttcttcctctcctggaaaaattagaagcaaaggaaatggcctctgcagccatgggcagaaagcagcctttacaaaggttagatgtggctatttcaagtgaggcccctgggccttcctactggaacctgggcttggctcctggctgttgtctctctcccctaggttcccgctgggaaggcttgataacaaaagcaggcttttaccagacaagcaaagatcaaaaaaagatgcaaacctttgtttgtttaatggaaattcctcagggttgctttcctgtgtattccaaagctatgacagaatgtttagggtttctgcccaagagggagaccaataaaataggatgacaagtcttacgatgtccctacttctaaagagaaggtaagaaatcccgtgctgaacatccactaggttctgggtatatactttatacacacatggcccctttattcctctcagtgaccctcagggtaggtctcactacccaagtgttagagtgaaggacgctgagaccaagaagaggaacaggtcagggtcagacagagctggaatttggacacagttctgtctgactccagatattccttgtatcacacaatactgtcttctgaagcaagtgattgtccccaacacacacacacacacacacacactctctctctctctctctctctctctctctctctctctctctctcagcagagctgaggataaagaggaatatcctgcacacttcttccttctgtgtcagggaacatttgcttgtctacagctcgagtatttgtaaacactcagtagcacccaaaccctgagccctagcagtttccttttgcttgtttactagcaagagtagcatgtcggaggacgatgagacattgaatcaaactcttagacaagctggtgaaagttttaacgactgctggaggcaacatgcttccacactgacagaaatcatctttcaaaaatcctgcacatatctcaggcttatgaaacaaactaattcctaatagttggaaatgaattaaaagcttgcggtgagataaaagatagattttggctggatgtgatgactcatgcctgtgatccctacactttaggagggcacagcaggaggatcgcctgagcccaggaattcaagaccagcctggtcaacatagcaagactctctctctgcaaaaaaaaagaaaaaaaaaaaaacctcccaaaaaaaaggttttactaggcatgaaaatgagtccatttccattctaggccccaggatatcaccatgaccaataaaaacaatctgtggcactcagcaggtgcatgtcaacatgggcaggttctttctccccgtcagcaggacaagaacatctcccctatccaaaaggcacccactgaggatccgcagttctctggaattatgctgagcacccagatgtgtgcaactaagccctgagcagtcgatgtggagcgcacttgaaggcacttcatttttttttaagatacactcttaggagtttactttaacccacttcccagctcatagcacacgaggagaggcagacattttaaccttggtaagacctgacaaatgacaatagttggaccccacagcaatcattacttttgtagacagcaaagttatgctccttggcttcaggtgaagacccccagatccaggccagtggatttacaagtgagagtcagcagcactgggcatttcaggcaatagctctgaacaagccctttaccatgcgggtaggtaaaccccagaatatacagatgccccttacgatacatgggtggggagggtatgtggccgagagagcataagcttaggagacagagtggatttgaattccactgagcttttggctgtggacccatggggacgtggcatatgtctcgctgagccttagtttcctcctgcatggaatagggagagcaatagtacctgcctcattcagctaacgtgaggatctagagcagcatttgcataaatgacgcgtggggcacagagcagactcaacacagagcagcttacgttatgaggcttggcaggctgggagctcctgtcggcctctctcctcagctctgtgcccactgagctcggcacaagggttggcccatgacaggtgtttattatgtggaaataaatgagagggacaagacatttgctgatttcttcactgtttccaactgggaattcaaatgtatctcacgttcccataccctcacaataaatctgttcaggagaaaaaatgtgtacgccttttaacagacagcactgagatatacagaaagtaagaactttcaggctgggcgcggtggctcacgcctgtaatcccagcactttgggaggctgaggcgggtggatcacgaggtcaggagatcgagaccatcctggctaacacagtgaaaccccgtctctactaaaaatacaaaaattagccaggtgtggtggcgggcacctgtagtcccagctactcaggaggctgaggcaggagaatggcgtgaacctggaaggcggagcttgcagtgagccaagatcgcgccactgcactccagcctgggcgacagagcaaaactccgt

SEQ ID NO: 7314 - DNA, 3089 bp, Homo Sapiens
  XM_379668
catccctgcattcctccatcgcagcatccctgcatgcctccgttctctgcatccctccaccccagtatccctgcacctcttcatccctccattcctgcatccctctatttttccatccctccattcctgtatccctgtgccctccatcctccatcccagcatccctccatccctgctccccactctcacttcccttcccttcacagacaggcttttcctgccatcctcagaccccacccagggttacctgatgcctttccagctgcacacggggactgactcacctctctctttctcagtcccaaagtcccgaaagagagcatctgatgtggtcagcttgtgacaaggcgtccaccttctgtccatgacatggaggccaggggaaggtctcactgcccagcaccccaccctgtgctcccaggccttttgaatgttcctcctgctcagcccagtgactgcgggctgtggctcctcctccagcctcccctcgaggtcctggtcttacttaggaggccccgggtgtagatgccttcccacccaccaggcattgccccttttcctggcttcacagactcgggaataaagtttccttctgtttcccctcttgcagaaggagatccggttggcagctaaaccgcgctgggaacaggggcctgagtcctggactagggctctttccccggggctgctgcagatggggaggagcctacacccgcctcccgagtgctaatcagacctgacaggctggagaatggccagtcagcctgaggccaccgcgggacaccacctaggcccagcttctccccccaccagagggcgccagagcccgccaagcctcgtaggagatggcaacagggcctgctgctgccacctagcggccaattccgggaatgaatctcggcacgctcattacccagcgactctgcccatcttgaccctttatgtgaagcagaacagccgcttccgcagtgagctgtcagaaggcgtcgtgcctgtcttgctagtggggaaactgaggctcagagaggcagaagacttgcccaagatcacaccaccgggacccaggattcaagcgcaggcctgcccaggctctctgtggcctcctggctgcgaggaggcagccagggaccaggtgccacccttctgagacacctgagatcccaggcccgagaggatgaaggcgggattacctggagcgtgtctgaatgctggaggaagaagggcagctgggagatgaagctgtcaggatgggccgcatcccatttcctgcctcgtttcagttcaactttccaacagacctccctggctcgtcttgctcttctctaatggacaaacaaacaggctcagagaggtggtgtgacttgcccaaggtcactcagcttggatgctatggaacagggacgtccactgtcccagtctgtttatgggaagccgctctgcaactgtcctgacccaccacatgccccaccgctgtttctcttgccctgaccccttgttccctggaccagggtggcacagctccaggctcttgggcccttcccgagggcaggcacctgtgactgtgtccccaaagacctgagtggctgagggggccccacagagcttggacttcctggaggacaaggaggggtctgccagccacccccaccacgcccgccccagggctcccctggagcttccatgccagccggactcaggtgggtctggaggagcaccgtgcctccaatcagaccttgagatgtgccccctgcccccactgtgccctcccctgcccaggagtctggttgcaaaccctgattaaggggattttatctccaccagagggccagtaggtgggaagtagcttaaacaatgcaggtttataatctcacagttctggaggtcaagagtctgaaatgggcctcatggggctaaaaccaaggtgtctgcagggctgtgttccttctggaggctccagggcaggaaggggaggatccacttctgtgcctttccagcttctagaggctgcctgcgttccttggctcgtggccccttcctccaccttcaagccagcagcggaggcctgagtccttctcatgccatctctctgttctctctcctgcctcctcctccacactgaaggacccctgtgatcacactggcccccccaccggatgacccaggataatccatctccctgtttgaaggtcggctgattagcaaccttcattccatctgcctccttcattccccctggccatgtaatgggattcacagcttctggggattaggacatggacatcttgtggcgggggcataattctgtcgacgacaccaagaaacacttggatgttaaggattcaccgaacactgttcaggctccaggtgctgggagcagcagtgaacaaagccaacagacactgccaccctcaaggagttcacgttcatgggcgagggaacagatgagaaacccggcaatgaaagctccaccatctcttcccctaaaggcaaccaccattctgatttctctcaccaaagactggaaaaatatcccaatacctggatgtatgcctcacgtgtcccgctggccccagcacccaggtatagttagttactgctgtgcctggcttcactctcactttttttttttttttctttttttgagacatagtctcgctctgtagcccaggctggagtgcagtgtggcacaatctcagctcactgcaaccttcacctcccaggttcaagcgattctcctgcctcagcctctcgagtagctgcgactacaggtgcccaccaccacacctggctaatttttgtatttttagtagagatggggtttcaccttgttggccaggctggtctcgaactcctgacctcaagtgatccacctgcctcagcctcccaaggtgctgggattgcaggccggccttacctggtatggtttttaggttcatgttgatgcctggagtttcagtaattccctcccattcgttgctgagtagcactgcaacacatgcaggcagctatttggggatcttttcacctgttgatgggtgtctggactgtttccagtttttggctgttacaaatgaagcctctgtgagcca

SEQ ID NO: 7315 - DNA, 8820 bp, Homo Sapiens
  XM_495863
agaaaaggaacctactctccatgcacgtctctctggagcaacctgaagacaggatcttggcctcaggacagccatggccacaggagagcacacccctgatgaccctctgctcagaggcaaaaggaggcaagacctccaagagatgctgagagaagtgggcctggatgttgagtactggttacccaagctgcaggaacacctgggtgtgacctgtgcccaggccttacaacacctagacaaaaacaacctcaagaagctgaaatcccagacacaacatccatgggagaaagctgcttaatctgtcacactcaaaaagtctttcagcgttacaggagtctcaggtggagagggcaaagagaaagcagaagcaggcagaacaggcactgcaggagctgagggacttgctgacagaagggaagcagagacaggaagaggcagtgaggacaagagaagcagagctgaggcaagcaatggacatccctgaagagtactggccatcccctgaagagcctctaagggaactcatggaaaacctgcagagacaactcaacctcatgaagtggacactgtgccacaggcaaaaccttccagatagagatgtggtgagatgggcatctggagggctggccctccagggaatttacaaagccagccaccaaaggggcctgacagagaagagagaggagttgctcagtgtccccaaagagttcttacttttgggtcctcagcaaggaacacaaatgaaaacaaaggaattcacatctcctcaggctgaattcatgtttacccagatggtagagaagctgggctttcgtttaactacttcagccaaggacggaaattgggggtttagtctagaagctggtttggatcacagcaaacatccagaatccaaggaaacccaacaatcaagttctgagaattcttatttctgctcaaccaagttcagctatatccccctggcctcctgccactttcccattgatcagctccagttatccaagcctgctgtccaggaattgaaatgcattgaagagcttctgagtcagacaacaaacccagacaggttctccttgctgaggcacaggatcataaacttcttccacaggtttggctctcatgttaaccaaggccctctgcacctgggaggaatctactggtggaaagccatttcagagggttattgcacggagcagttggcagaagtgaggcagcagtctgcagaggccctggacattttcataagggacagctacagtggctttggagtgaaagttgctgcaggtgtgaatgtttcagactctcattcgaagacagccactcagaccaaaacttcccaaaacctccaaaccaaggtccaattatctgtggcccaaacaggtggcccaccagaagcagatggccttgtccagtggaaagctggcctcattgccagcaatcaaacctggtgtgtcattgaccgcgggcttcagttggtgccagtttgggacattatcctctctagccacagaagcaattttaaggatcctcttcaggtggctaacttcctgaaagacagctacactgctctgactagcatcactgcccagatccagaatggggaagagttactgagtgctgggaaggaggccagggtttttctagaggatgtaaaatcttgggaggtatctgatcctgaagagcaacttaaaaaactgataaatttcatgaaaatgttgagtcaaaaactaaaaagttatgacacttggattaatatatgtctcacagattagagtctgcagaattttctagtaaacaccatcaacttttgcaaaaagtcttccatttataaaactaaatgtattaaatctcatttgcgcagccttctggatcctcacatctacagagtgacaaactttcctcaggctcacttcatcatgcagtggatcttccagtcagattcagagcaggagcaggtgaatatttcccaattttctcaattaattgagatcttaaaagaaacccagaataacctcatggaagtaaaggtcaaatctgagtccccagaaacagtggaggaagctcaaagaaagtccacttatgaggtcagcttggctctcagctgcttcttgaattatctccaaaaaacagagcagacagacacacaactcttgctactttccattgcagctgctgcaggatatcatgtgatcaacaatacttttcagagtctcttggggtgtgatgagttaagcttcctactggatgaaatgcaaaccgcccaaaataaataccaggagcttaagaatatttgcagctatagggctcaggcattcctggttctcacaggtctgacagccacagttggagacacagctatttcttcagaagagaaaacacaacgcatgtcattaatgagacatcacatgggacaatcattgtccaaagaagttgcacatgtcctcaccaaacctggagcagatcacgattgggaaaacctagagaaagacttgagattgctcattaatggggattatgaagaagtcaccatctcttctttgcaaatggaagaggtgagcaagcaaagtctcttctatggaaagaaacagccccatgaaccacatgacaatgaaaataacaaatgggagatgataaaaaatggagccttcctagacttactccagcatctaggtctagaacattactaccccaaaaaattgagcaaagctaatttccatctcatctataagacgtctgtgtataacacccagcccagctctgaacaggagcttcccttctatttcctgcagaaactactgatgatggattatgagctgagatacctagtcttcaaagatgatagaaacacagaacaccaagtacatccaaatgcttcagatcaggaagatgaggcttttgacccatatgaaaacttttttgaagacagtgatagtcccactaaatcttcatccactgagcctagcccccacattcacccagtggatattcagatgacaatttttcactgtgcagataattttgccagacaatatattttggccaaactttccacttgtcagtttgccctcccccttttggtgcctaatccctgtacttctcagattgaattctctctctggtctctccgtcaaattacaagaagttggcaggaagcaaggaaatcaccaaaagggaagaactattataagaatcagcagatgtgctgtgtctctacctcaattgtgtccttcgtaagagttggaaatggcctctctgcttctaaatctcagattatgaactgtcttctcagtaaacggaaacatgatgtgttttttcaccgacactgcacaggaagcaggaaagactgcctcttgatggggggcatggtagagatctgttggttctgtccaggaggggaagatgaggacagatttgacaactgtgtgaccttcaccaatcttcatggagatgcaaaagaacatgagcagcagctcagcttcctgaaggaggtgtctactgtcattgtggtcctcatgtcagcctccgatgacaatgaaggaaaccgaaaaattgtccgtaacttgtggcagtcatcaaggccattgatctgcttgctcgatgacaaagaagcaaccatgaccaatatttctggccaaagaatgagaatgggtatcaagaatagaaatgaggcagaattaacagaggaactcacaactacaatcagacatttgctagaactctcagatactgctctcagcttggaggactgttcccagattgctcaccagcaaggatttcttatcgatgaagaccagagagactgcaaggaagccaaagaaaaggcacaggctctaatggccttcctggggaaaatgaaattatctcagattaaggaaaaattactaccccttcagggacaactgtggcaccactggtgtaagaaggacaaagaactctatcatcttagagaaaagggaaatcagagcattgaacaacacaagagtgagattgagacagataaacaaataatacggcatgaacagttggccagagcccttcctctcaatgatttaatgcaatctgtccttcagtttctccaagagcattcagaaattcacaccaaactgtacttcttgcagtggctgagtgtatttttggacaaactgactgcaggacacttggaagaactgcatgagaagcaaaaatattggtggtcactggttcaaacagtaaagcaaaaggcacctaatagtcactccctgatatgcctgcaaagtgagatagaagccatttccacagagattagtgactgtactttgggaattgagcaacttatcagagaagttggtcagatttatgaagctctggaagaagcttcctccataaaaaagatttttttctcgcttccccaaattgccgcagacctgatgatatctggtgttcccattgagctgatggatggggatgcagcatatgtacctctaacatgggtggcagctgtttttgacaaggtctctgagaaacttggagacaaacggctatttgttctttctatccttggcttgcagagctcagggaaatccaccgtgctgaatgccctttttgggcttcagttcactgttagtgcaggcaaatgtacccaaggggcctatatgcagctcctcaaggtggaggagacattcacggaggaacttggctttgactttgtgcttgctgtggacacagaaggacttcgggcaccagaacacagcaacaaatccaaggatagggacaatgagttggtaacttttgtcattggacttgcaaacttgactctgatcaatatttttggggagaatccatcagagatgcaagatatcctacaaatagttgtccaagcctttctgagaatgaaacaagtaaaaatctttccaagttgcctctttgtccatcagaatgtgggggaagctacagctacggaccaaactatggatggacgaagacggctagagcagaaactagatgaaatggcagcaatagctgctgaacaagaacagtgcttagacgtaacctgcttcagtgatgtcattaggtttgatgtcaatactcacgtctactactttgctcacctctgggatggcaaccccccaatggcccctcccaatcctcgctacagccacaatgtacagcaactgaaaagtagaattcttatgactgccacacaggaatccaggggaaacatcatgaagatatcagatgtaaaatcccgagttcaagatttgtggagaggcctgatgaacgagaactttattttcagtttcaggaacacccaagaagtcatggccatgaacaaactggaaaccatgtataaccactggacctgggagctgaggagtcacgtgctgggcttgcagaaccagctgatcaaccagattcagaatggaaaaatccagacacttgaagcaagcacatttgaggttctagttacagaaaaatatgaagttgtcaagcaagaacttgaaaaatattttaatgaaggcccatgtagcaaaatactgattcaatgtaaagcaaactttgaaaataagctaatagtccttaaagaaaaacttatttcagatagcaaaagacaagccaatgaactcattagttttaaaaaccaaagtcaagaaaggctgaataagaaaaagacagattatgaaaaagaattattggaaaaaagccggaagttggctttaactgtaaagggcaaagaattgagtgaggaagagttacatgagaaattcaatcaactttggaaaaagtgggtgtgtgatgtatccacaactctcccgcaagttacagagcctgacattgatttggattctgaaaacatcctttgggagtatttcaaaaacaagacgaatgtcgtgggtctactgacaaattctgcagagaagtttcaaatcaattatgataaacatatcaaggtgaataagaaatataaccatatcccaatgacattaacagtctttgagaaagagttcattaatatgactactgactacattgtttcaagatttaataaaattattaacaacatgtggaaacaacagtgtggttacaatccaaattatttccatgagattctaaagacaatagaagaagaagtgaaatctgcctctactcagaagagatacacatttacaaatacatttatcattgacttatgtgtgtgtttatttcaaagagcaagagagaattttaaggaaatgcacagggcattcaagagagcaaatgatcctgtaaactacctagaaagtaagaaagatgatttcttcacgagttttaagatctcctgtcaaggagcaacctccatcaaaacatttgttgatgttctgtggtataagctcactcctgcagtctccactactatatgggaggacatgacctttaaaattgcgggggacatgcgagctacctgccctgcgttcaatggaaacaggactaacctggagaaacacattctcttctctctggcagaagaagaaaactttgataattactgggaataccttcataattcaaaatcgttttttaggagttacatcaaaaatcatattaaaagatattgttcagacaatggaggtgaaaaaatgaagactttttttgaaaaaagcttaattgatatcaagaataccatcctctctgccatccatgaatccacatcagtagctaaagataaaagcagcactgcttctgagtggttggatttattctgtgattgcctggggtgcaacttgatctttccacgaagggacttgataagcattgaacaccaggagataaaacatactgaatttcttaaagaagccatgagtgcagctttggatctcacaatgaagaaaatagaacagaattattcaagtaagcctatagaagcaatggtttctaaaattgagaaaatgctctctgaacatctctgtggctgctggaaacagtgtcccagctgtggagcaatttgtacaaacacaattcctacacatgaaggagaccatagtgttcccttccaccgtcctcaggctgtcaatggggaggaatggtatgaaacagatgattttgtcattgattgctgtactagtttggttgcaagtgattgtttgttggttttgagggatggcaggaatttcccatttaagaactatcgacaagcaggaggggattatgccatgtggagcatcaccccagatacctccatccagctatactggaaatggtttgtctctcacttcagatcaaatctagaagaaaaatatcagaaaaaatttgcaggtaaaggtaaaatccccaatgcatgggccaaaatcacaaagcaagatgtgcttgaagacttgaaaaaacagtaatactcagtgaccacaaaagagccccagtgtctgaagaaaagaggcagtgtacctgaacaatccaaaaacaactactcattacaattagaaccttcatcatttccatgtttaaaatgaaatgtgtaaaaatcaatcaattaacacattaagagatgaaaatttccagtaaaaggacttcatttctctctgcctcaattcctctagtttaaaaacaacttactaaaatctgttaatatatgatgaaatcaaataacattcattttagaaacctattttgtattttaaactattattctagatattgcttttttattttaaaatatttaagtatcagagaaagtcattttaacagagaaaaatcaaaatcatttcaggctgcaacaaatttctatagaataactgtatcagtatttcaaccaatatacatgtcttgactgaaagctataaactggctcactgcaacgtccacctcccgggttcaagtgattctcctgcctcagcctcctgagtagctggaactacaggcacacaccatcactcctatttttttttgtattcttagtagagacagggtttcactgtgttggccaggctggtcctgacctcaagtgatccacccatctcggcctcccaaagtgctgggattacaggcatgagccactgagcccagccagacttttcaatgtttaagtggatttttttcaccctctaaagttttaaggaaaagttattaatctttaaatgtaaaaacattcatgagtcccaagcatagcaatatttaggcatattctgttctaggaaagaataaagcagagacttgaccaagatagggatgtcatcaattcaggaaacattatcaagcaaatatggaaagtagaaatcaaataactgtttttctcattaactttcaccctgttcttccctggtatgttggcaattccctgcgcatgctaagaaaaaaaaaaaaacagtcacaaagctttgttattcaaagcttggtgttatgtacaagtctgagaattggcttttggaaaaaaatttatgatgaccaaataaaatgtaccattttaatgaagtctgtggacaaggttcaattagattggttattttaaaatgattcattgattattttaaactgattacttaaagaaaaatatcaaaaagtatacagttttaaggccgggcatggtggctcatgcctgtaatcccagccccctgggagacagggcaggcagatcacctgatgtcaggagtttgggaccagcctggccaacatgatgaaactccatctctactaaaaatacaaaacttagccaagcatggtggcaggcacctgtaatcccagctacttgggagcctgaagcaggagaatggcttgaacctgggaggcagagtttgcagtgagctgagaacaagccactgcactccagcctgggtgacagagcgagactccgtgttgaaaaaaaaaaaaaaaaaa

SEQ ID NO: 7316 - DNA, 4339 bp, Homo Sapiens
  XM_495939
atggaggccaagagtccgtcgtcgggcgacgagcccgagcccagccccggcaaggagaacgcgggcctccgcggcgcgcccccccgaggcgccgcccccgcgccccgcaccgcgcgtcccccgcgccgccgccgccgcgagtccagctcgcaggaggaggaggtcatcgacggcttcgccatcgccagcttcagcaccctggaggccctggagaaggatatggccctgaagccacatgagcggaaggagaagtgggagcgtcgtctcatcaagaagccccgggagtcggaaacctgcccccctgcggagcccagtgagaacaggcggcccctggaggcaggcagccccgggcaggacctcgaacccgcctgcgatggggcgagaaaggtcccactgcagccctccaagcagatgaaggtcaccgtgtccaaagggggcgaccgggacagtgacgacgacagcgtcctcgaagccaccagctcccgggacccgctcagcgatagctctgcgcatgcggtctcggggagaggctactcttgtgacagcgagagcggcccggacgacaaggcatccgtgggctctgagaagctctttgcgccgggaaccgataaaggcccagcgcttgagaagtcggaggccaaggccgggccggtgcccaaggtgtcaggcctggagcgcagccgcgagctcagcgccgagagcttcctgcccactgccagccccgcgccccatgccgcgccctgcccggggcccccgcccggctcccgcgccaatcccttggtgaagaaggaaccccccgccccgcaccgccacaccccgcagccgccacccccgcagccccgcggcctgctcccgacacacgtgcctgcatccctgggcgccttcgcgggccacagccaggcggcagccaacggcctgcacggcctcaggagcagcagcgcccccctgggcctggggaagcacgtgtcgctgtcgccacacgggccgggcccccacctgtctacctcacacctggcgctccggtcccaggcgcagcaccagctccacgcggccatgtttgccgcacccccgacactgcccccgcccccggcgctgccggccagcagcctggtcctcccaggacacccggccgatgccagcctggcggtctcattcagccagccaatcatgtattgccagcctcattcgggaattctgattggtacttggtcacaggctcctctcttacctgcacccctgggcccgcacgtggcgagcggccaccccggcttggcctgccgaccccgggagtgccagtttgacaagtatgcgcccaagctggacagcccctacttccgacattccagcgtgagtttcttcccgtccttccctcctgccatcccgggactgcccaccctgctcccacaccccggccccttcgggtccctgcagggcgcttttcagcctaagacttcaagccccattgaggtggcccgccgggctggtgcggttcacacactcctgcagaaagcgcctggggtgtctgacccgtaccgggcggtggtcaagaagccggggaggtggtgtgccgtgcacgtgcagatcgcctggcagatctaccgtcaccagcagaagataaaggagatgcagctggacccccacaagctggaggtgggtgcaaagctggacctgttcggcagaccccctgccccgggcgtgtttgcaggcttccactacccacaggacctggcccggcccctcttccccagcacaggtgccgcccatcctgcctccaacccatttggaccctcagcccatcctggcagcttcctgcccactggccccctgacagaccctttcagcagaccgagcacctttgggggcctgggcagcctgagcagccacgcctttgggggcctgggcagccatgcactggctcccggtggcagcatctttgcccccaaggagggctcctccgtgcacggcctgcccagcccccatgaggcctggaaccgactgcaccgggcaccgccctccttcccggctccgcccccgtggcccaagtccgtggacgcggagcgggtgtcagccctgaccaaccatgaccgagagccggacaatggcaaggaggagcaggaacgggacctcctggagaagacgcgcctgctgagccgggcctcgcccgccacccccgctggccaccccgtcagcggcctcctgctccgggcccagagcgagctgggccggtccggggcccccgcggagcgcgaggccgaacctcgggtcaaggagagccgctccccggccaaggaggaggccgccaagatgcccgcgcgcgcatccccgccccacagcaaggcggcccctggagacgtgaaggtcaaggaggagcgcggggaggacgaggcctccgagcccccggcgggcggcctgcaccccgcgcccctgcagctcggcctgggccgcgagcgcctgggcgcgccgggcttcgcgtgggagcctttccgcggcctggagctgccacgtcgcgccttccccgctgccgcccccgccccgggctccgccgccctcttggagcccccggagcgcccctaccgcgaccgcgagccccacggctacagccccgagcgcctgcgcggggagctggagcgcgcgcgggccccgcacctgccgcccgccgcccccgccttggacggcgcgctgctgccctcgctgggagccctgcacttcccgcgcctctcgcccgccgcgctgcacaatgggctcctggcgcggaccccgcccgccgccgccgccctcggcgcaccgccccccctggtgacggcggccgggccccccacgccccccgggccgccgcggagccggactactccgctggggggcctcgggccgggcgaggcgcgcgactactccccgtcccgaaatcccccggaggtggaggcgcggtagccccggggccgcagacgcctctccgagcggagcgcaccgctgtccgtctctccatcagttcctagaactcaagcacagctcccgccgatcctggggcggcgccgcctctccacccgcagcctgcggaggcggggacttgggtgtcggcttttctgagggtgatcttttgttttccgagtttgggattcggctgttgggaaaaaaaaatcgcgtttgtaccttttccccccacagatgagaagtgtttgtaatggatttgtatttttcttaattttatgctctttagacgtttaaaagaaccaaaaaagaaacttttgcttcttcgttttcggttgggatttgcagtttaatggcctcagatccttctccagatccccagggtttctttgtcttatttatggagaaaaaccggtcactttgtccagcgcactgtgaggcccccactcaggccagccctggcccccccttggtacttggaaccgaagttacagattatattaaaataataatgtacaaaactttgtttttttgccttattatgcagaagtgtaatttcttttttggtttgtttttttaaaagcaaacgaaacgtgtaaatagtctgttgatataaatatatgacgttactaaattcttaatctagatagactttataaaaaccgtttccagaaacccctctggttgtttgtctaacatggtcacaaaaacccaggcgctgctggctgtaaacattatcagaagtttaatggcagcaactttccttcaactatgcaagcgcttcccggcggctctgctggttgggggaggaaggttccgccagcgacctcccagcccctgggtccgtggaggggttgggtcccccagcagagcccctgggccagcagaacagcactcctgggcggctcctgtgggcttcaggactggccggctccagccgcaagggcgatgctgtggacgtttgtgtggatggtgcagtgttcttggaatctgtagaccagatcggtggaggtatagaagtgcaagagtctaaaggctgattttacacacacacacacacacacacacacacacacaaaatcactgctgtgtgttttcttccgcctgaggcatcagcgtcacctcggtgtggtcgtcgcctcccaggcccttggcctggcctcctctcagtttgggttttgccctcacccacatgagcccccccatgccctgccccccttgcggccttttgtgttccccgatgtctgggctgtgtccctgccgggattcccagccttcggggtcagccgtcgagccacttgctttgctcagttctgtgtttcagccacatttccacggtggaccctgtttgttttaaatattctgttcccatgtcaatcagtgacgataaatacagccttgatttggatgaaac

SEQ ID NO: 7317 - DNA, 2440 bp, Homo Sapiens
  XM_496037
attctagtgcagccctggttacgcctcctctggctcagtcacacagcgacgtagaggtgactggaggtatatacttgtcctcacctggatcatgctgatgtggccccaaccccacctccctacccatccccacctccctacccatccccacctccctacccatccccacctccctacccatccccacctccctacccatccccacctccctacccatcctatgatgtccaaagaaaccagacagagcaaattggccgaggccaaggaacagttgacagaccatcatccccagaccaaccctagtgttggtacagcagcaagcgacaccaaaaagaagaaaataaataatggcactagccctgagacaaccacttctggtggttgccactcgcctgaggatgaacagaaggcaagccaccaacatcaggaagccctaaggagggagctagaggcccaggttcataccatacgaatccttacatgtcagaaaactgagcttcagatggcactctactacagccagcatgctgtcaagcagttggaaggagaggccagggatctgatcagccgcctgcatgattcatggaagtttgcaggagagttagagcaggctctctctgctgtcactacacagaagaagaaggcggataggtacattgaggagttaacaaaggagagggacgccctgagtctggaactgtacaggaacaccataactgatgaggagctgaaggagaaaaatgccaaactacaagaaaaacttcaacttgtagaatctgaaaagtctgagatccagctcaacgtaaaggagctaaaaaggaaactggagagggccaagctcctgctgccacagcagcagctgcaggcggaggctgaccacctgggtaaggagctgcagagtgtgtcagcaaagctccaagcccaggtggaagagaacgagttgtggaaccgcctgaaccagcaacaggaggagaagatgtggaggcaggaggagaagatacaggagtgggaggagaagatacaggagcaggaggagaagatacgggagcaggaggagaagatacgggagcaggaggagaagatgcggaggcaggaggagatgatgtgggagaaggaggagaagatgcggaggcaggaggagatgatgtgggagaaggaggagaagatacgggagctggaagagaagatgcacgagcaggagaagatacgggagcaggaagagaagaggcaggaggaggagaagatacgcgagcaggagaagaggcaggagcaggaggcgaagatgtggaggcaggaggagaagatacgggagcaggaagagaagatacgggagcaggagaaaaagatgtggaggcaggaggagaagattcacgagcaggagaagatacgggaggaggagaagaggcaggagcaggaggagatgtggaggcaggaggagaagataagggagcaggaggagatatggaggcaaaaggagaagatgcacgagcaggaggagaagatacggaagcaggaggagaaggtgtggaggcaggaggagaagatgcacgaccaggaggagaagatacgggagcaggaggagaagatgtggaagcaggaggagaagataagggagcaggaggagaagatacgggagcaggaggagaagatacgggagcaggaggagaagatacgagagcaggaggagaagatacgggagcaggaggagaagatacgagagcaggaggagatgatgcaggaacaggaagagaagatgtgggagcaggaggagaagatgtgtgagcaggaagagaagatgcaagaacaggaggagaagatgcggaggcaggaggagaagatgtgggagcaggaagtgaggctgcggcagcaggaggagaagatgcaggaacactaggagcacctggaagctgccatctaatgagcacatgacaagaaggcaaagacaataaacatgtaaaagccggcagcaaggcctggagaagagtaagccgccatgtgactgtttagaatatagtctgagcacaaacctgaaaaaaaaattttatttattttaaattgtggcaaaatactggccaggcatggtagctcacgcctgtaatcctagcaatttgggaggccgaggtaaatggatgacctgaggtcaagagttcaagaccagcctggccaatacaaaaattagccgggcatggtggcgcatgcctgtaatcccagctacttgggaggctgaggcaggagaatcgcttgaacctgggaggcagaggttgcagtgagctgagatcgtgccactgcactcaagcctgggtgacagagcgaaactccgtctcaaaaaaaaaagtttcttccttacatgtatgtttctattagttttcttcttggtctttctcatttagtcttgtgttgtcttttgacattcatagtaaacttttatctgcctccagag

SEQ ID NO: 7318 - DNA, 4167 bp, Homo Sapiens
  XM_496071
atggaaattgttattagaggccgcaaagatggtcatctgtgtttcaagatagtggaacaattagtgaagctgatggctacagttacacggaagatagaaaacttgatgtggctaaaggaaatctccaagttgaatgccgaaggggctaatttgtttattttagctgcctatgataaaatatgggaaggagagatgaaccaaaggaagagcaattccatttccaaggagaatttagagttaatagttctggactatggattgctgggacggaaaataaaactctctccccaggggttctcaatactaacagggatgccaaaggaaaaatatgatcctccagatcctcgcagaatttataccatcatgtcagcagaggaggtagccaatgggaaaaaatctcactgggcagaattagaaatctcggggaattgcttgttacgggttttgccttatgaacttggtgggctcttccagctacaaactctaggtttgaaaggcaatcctttatcacaggatattctcaacttataccaggacccagatggaacccgaaatctactgaacttcatgcttgacaatctcgcagttcatccagagcagcttcctccgaggccatggattacattaaaagaacgagaccaaattctgccatcagcatcattcacggttatctgttacaatgtgttatgtgataaatacgctacccggcagctatatggttattgcccatcctgggcattaaacttggaatacaggaaaaagggaattatggaagaaattgttaactgtgacgcagatatcattagtcttcaggaagtggaaacagagcaatacttcactctctttctgccagcattgaaggagcgtgaatatgatggatttttttctccaaagtcacgtgccaaaatcatgtctgagcaggagagaaagcatgtagatggttgtgcaatatttttcaaaagagaaaaatttacattggtgcagaagcatgcagtggaatttaaccaagtggcaatggctaattcagatggatccgaagctatgctgaacagagtgatgacaaaagataacattggtgtcactgtggtattagaggtccacaaagaactatttggagcaggtatgaagcctattcatgctgcagacaaacagctgcttatagtggcaaatgcccacatgcattgggacccagagtattctgatgtgaagctcatccagaccatgatgtttgtctcagaggttaaaaccattctggagaaagcctctagtaggtctggcagcccaactgcagatcctaattccatcccgctggtgctatgtgcagatcttaactcattgccagattcaggtgttgtggaatacttaagcaatggaggaatagctgacaaccataaagacttcaaggaactaaggtacaataagtgtcttatgaacttcagctgcaatggaaagaatggaagctcagaagggagaatcacacatggcttccaacttaagagcgcctacgaaaataacttgatgccttacaccaattacacctttgatttcaaaggcgtgattgactacattttctattccaagactcatatgaatgtgcttggtgtcctggggcctttagatcctcaatggctggttgagaacaacatcactgggtgtccacaccctcacatcccttcagaccacttctcactgttaacacaacttgaactccaccctccactcctgcctcttgtcaatggtgttcacttgcctaatcggaggtggtggagtactgccccgccaagacggggatctgttgctatggacctgtacagttgtaaatcaaagtatgtaggagtgaagtatggccatccttaagctgcttcttcacgtttctttctttatgtgtttgctgtaagactttgtacatttttgtgcatattggtatcatttggcagtagggctggaaccaaagtattactctctttccaaaattttaatttaacatgtttttaaattggaccttctttatattgtattaacagccagcattcaaaattgataaattaccaatttgaggcccaacaacagtgtatttgtttttccaaaacaaatactttcttttgaatggtttcagtgagccaaccattttataaaaggcaatttttaaaaactataaatacagtattttaaactgaatgatgatatgccttccagggaaaaccttgaatttttcctttataactgacttttggattcccaagtcatttgcacattaacagagtacttaaatttacttgttcagtacataaactatgatatagcctctatacatggaaagaaaatttgaaaagttaaagatggttgcacagtatgctttcataatcaagcatgtaacaccacatgacaatttgttggccaaatgctggtttggagtttttttgaggaatcactttggtttttttgtcctctctatataaccttattggaagtattaattctaagcctgtctctcaagtttatttatagagaaagagtaagtaatctgtattgccacataccttgaaaatagaatgcggtacgtttaggatgcccacagaatgaatttttccttattccaattcaaccttctgtctggttgtgccaggaaaacagatgttatatgacctatatcatttttgccattatagtcaaatgttaaaagaagaaaaaaatctgctgaataaaaaggccttgatcagagtttcagatggggaaaatcatacagatattttatgtgtttccaacacagattatgtggctgttggttttttgagatgacagtgcaaaggatttgggagagagaacaaatttggggcagtagttgaaaacgttgggtcattttcctgactctagctgccaaatggccatcatatgcttttaatctttgtttcagttgtctgtcagggtttaattaagaagctactggtttattcccaattgttgatgcctttaggtatgttggaatcttttttttgcctaggaggagccagttgaaaatctgtgactcaagaggcagtgaacagaatactgttttctggggaaaaatttgttggctacttgatgttaattatggcacagtaacaggaaaaggttgtgtctgtgtttttaagtttttctttattctgcttttttgctgctataagagttttctgaaatttatattttaaacttttcatgcactttactgtttctagtctcaaaatgtgatatttttaataaacaagaaattttccattatgtgaatgaaattttaaaagacaatagcctatatttgtgtctcactaatatataaagtacaggttaaatttaaattatttaattagttttaaatatacacaatttgtctcctctttcaaacctgacatcttaaactgttttattagtcttaaatgatgcatttactttagtcattttatgctaatttcttccatagtaaattaatcaggctatataaggtaatatttccccagagggtaattttagttggaggagggtggtgggatgatgtcatatcatacatgggattgcatcagaagggttctgtaaagcctgaactcccttttaaaagtgcctagtgatagaggcgttgtttgtcatctattataattggaatgtcattgtagttcagtgaattttgatgtaaataaaatatcttttaaaaatgttaaagtaccagaataaacaaacaaaaagaaacaacccttaagatgacagattttcctcaacatgcaggtttcccttcttatatacctcaagtatccaacatctagccatgcaaattgattacctgaagcatagtactagaaagtagaatagcatgaaaaacttaattttgtggacattacctttttttgtaatcagctactgtatgttttattttagatcttttgttttgggtgggttttctgctctggaggtatatgcattaacaaaacattttcctccttcatatatgcatgttaattagcaatgtaagcaatatttcctaccatacttcactcccaatatttttggagatgtttgtataaaatggaatttaaagttcacttatgattgtatatgaaccacagagaagcccatttattaataacaaacttttttaatagttaaatgtggaaggaaaaaataaaaatgggaaacattgta

SEQ ID NO: 7319 - DNA, 3165 bp, Homo Sapiens
  XM_496129
ggaacgtgtatatcaacaacatacccataaatataactgagatgagatctaatgtcacctcacttgacagtgccctcccatgcagtatcaccacatttgacaatgcccgcccataaaatctaccaaataaatcgaatcacttaataccgctacaagatgagagatacattctttagactccccaagggacgcagctgaaaaatcccaaagttaattttaagccaaaaagacctgatttaggattttgacactggagaaacccatcaaagatgtcaagtttgaaaacacttgatcaaaacagaatcacaggtcactattaaaagggtattcatttaaccagagacttccaaagcaatacagaaacttacatggatataaaaaccttaacccttttaaaggtcagatttgctaagtgatcaaaaggggtacttgaattgagtcgacacaggaagagtgtgtacagggttatgagtgtaggcaaatggttactttggtcatatctccatttgccacctgattacacatgagaatggcatctttactcatcagaaagccagtattatgggaggtgtaggaggcattcttggacttgagacgagaacattgttgtgtagaaatttcattgactgtgttaaaattattctccatgggctggagaacacataacttggtgtttagaatgagacgggcatggattggatgcaaggtctccacacttactagctgtgtgacattggacagagtgcttcatcattctgagactcagtttttaaaggaaaaacaactaactaccttgcaagcttgctagcaggtttaagtgtaataatgtgtgggaatgactgcaccgtgactaacacgtagtgacagcttaattaatgttaacccttatcattatcatataagaaagtgagttacataagagaggaatcctgtcagttcgttctctgctgtgtccccaagaccatgaatcatggctggcacgtagtaggcatttaataatatttgttcaacaagtatttggcagtcttggagggcagaaaaggaggtggggaagatttttaaataacattttttaaaaagtcacattgtcctacaataccgatttttcttgcatatttaggaaattgagggttttttcctaaaacatgcggacatatgggaaataggatgcaacatttgcactaatgtttcagacacagttagaggtttccaagagattttgcgctggggaggctgcttgctacaagctcccaaagctctgggaggacatagtattcattcctccctcagcagaagcggtgaggcaagaagctctggggagcacccagccttggacttttagcatagtgtgtcaggtcttcatagtttgggcccggggcacagagaagtcacagctctccagcatcctgtgacctttaccctctttgccaagggaaaatgtggcccaccaaagcaagaaacttgagggcatgggtcaccccagccctggcatctgcccagagcccgagaaggaaggaacaatgatcctccagctacctcacggggctggcacaggtgaccactgccctggcatcacccagctgtgtccggcagcctgaaccccatctgtggggatgtgaggaggaaaatacaaaagtccttaggtgaacactgagaaggcagatgcagcagaaacctccaggccggaactacccagtcttggacctatggtggagatagagcatagctggcgatcatgtgtacttacactctaaggtcacctggttgcactgtggcctcatctgtggctctgaaaatgaagatttggaaggagatcatcacagctaatgttaacaagcccctcctgtgtgccaaatcattcacccctcaccacaaccgaatgagctaaggattctcattatatatagtttatggagagggaagtgcagacataaagaggtgaattatcttacccagatcacacagctgataagtggtggaggcagaatagaatctaaacagtgtggctccggagcccacatgcattgattcgacaagtgtttattgagcacctgccacggacaaggccttgtgtgattaaatagggttataattaataatataaaagtgagaaatcactaatgctttttagacttaacattttctttttttgtaggtttcaggcacagaactgtatatccaataatagtgaaatggatgccactaattatgacagaaatgatgatacatttaaatgacttggatgttttgtaggtatgatctcgtgaaaccttgagagaaactgaatgaggaatgaaactattgttcctgtttcacacagaagaaaactgaggttggcactcatgatgagcccctgttctcattctgcaaatggtgaagctctctatcgtcctgaccccacagttcctgtcccatgaccagggcccgctcaccaaggagctgcagcagcacgtaaagtcagtgacatgcccatgcgagtacctgaggaagacgatcctacacctgccacctccgatggatccactgcctctgtgcctgcctgtactgccgatgctccagtggataactcagcatcccagccaaggcccaatgccactgaagatggacctgccccctggggacccaggagtcctaccactcagctgtccccaggagtgcccagaccctcattcttatccaggacctaggagccttacccctggccttccctcatcagccgtaaatgatgatttactgctgttaccatcatcactgccttcagtgaccaagggccttccaaggtgccagctctggaacgaaggatgcccttgggaggtgatgacactcaggttgatggacggatggctacatggatgtgatggagatggtttactatcgggaccttccgcatcctgctgatgttttgttgcttaggatatgaatggctgagcggaggctgtaaaacctggcactctgcttgggtatgaggttcttcctgccatcctgccatcatttgttttttatgttttgtcgccaaaggtgaccttgaggaaccctgggagctcaggaaggaaggagcgcccagaagcagggacagggagctggttggggaggaccagaaatcagtagagacggggtttcaccatgttcgccaggatagtctccatctcttgacctcgtgatccg

SEQ ID NO: 7320 - DNA, 907 bp, Homo Sapiens
  XM_496442
cttcattttttgcttgtgttttttgaggttatatgaaacgttttaaatgtgacctgggagaagagtgaaatagagttttaacttaaccaggatgcatgattttaaaaatcgaagtaggcctgaatttcctgaaaattttaaaataatctagtagtgccagcatgaaccttagtcacttaggcaatagagaaggttttcatggaaatccattggtctgttttaaataaataccttgaatattaatagtataaaagagcattatctaagtaatactgaagcttattatcagctgaaactttcttgatcatgatggttagccatttacgctcacatctgttaacaatggtgattgctttcatcaggaaaacaacctttagatatgcaaatagctctttctgaggatccggcaagatggcagaagtagagcagaagaagaagcggaccttccgcaagttcacctaccgcggcgtggacctggaccagctgctggacatgtcctacgaacagctgatgcagctgtacagtgcgcgccagcggcggcggctgaaccggggcctgcggcggaagcggcactacctgctgaagcgcctgcgcaaggccaagaaggaggcgccgcccatggagaagccggaagtggtgaagacgcacctgagggacgtgatcatcctgcccgaggtggtgggcagcatggtgggcgtccacaacggcaagaccttcaaccaggtggaggtcaagcccgagatgattggccactacctgggcgagttctccatcacctacaagcccgtaaagcaatgccggtccggcatcggcgccacccactccttctgcttcatccctctcaagtagtggctcagctaataaaggcgcacatggttccaaaaaaaaaaaaaaaaagatatgcaaa

SEQ ID NO: 7321 - DNA, 920 bp, Homo Sapiens
  XM_496483
cctctgcccagacgccccatcttggatgtgaggagcacctctgcccagccaccaccccgtctgggaggtgaggagcacctctgcctggccgccccgtcttggaagagaggagcatctctgcctggccaccccatctgggaggtggttgtgagacaacttcaacaagaagtggctgattcccttaaaaaattaactatgttagagtctccactggaaggtacatgatgtcacattaatttggaagagacacgggcctcaaagaggaaattatttcaagtggaaagtcaaatataagaaactcctggaaatgacaataaatgtgttaagtgtatttggaaatgaagacttcgattgccatggagacttaaaaacagatcaactgaaaatgaatattctgattaagaaactaaaacataagtttgatgatcttacagcagagaaggaagctgtatcttcaaaatgtgtcgatttggctaaagacaatcaagttcttcaacaggagttattatctatgaaaaaagtacaacagcaatgtgaaaaacttgagaaggataaaaagatgttggaagaagaaatattaaatcttaagacacatatggaagacaatatggtagaacttagtaaactacaagaatataaatcggagctagatgaaagggcaatgacggcagtagaaaaattagaagaaatccatttacagatggagctggactgtgtggaacaaataattagagaaacaaagagaactgttgctgtgttggacacttgctcccatctattttcttctctagaatccactgcgctggaatgagtaattttttttagaagcagaggtggagccactgaggaagcacaggcgagccctccccagcgtgtactcactggtccccaacagaagaacagctgctgcatccactgag

SEQ ID NO: 7322 - DNA, 456 bp, Homo Sapiens
  XM_496558
atggaagccccagcacagcttctcttcctcctgctactctggctcccagataccaccggagaaattgtaatgacacagtctccagccaccctgtctttgtctccaggggaaagagccaccctctcctgcagggccagtcagagtgttagcagcagctacttatcctggtaccagcagaaacctgggcaggctcccaggctcctcatctatggtgcatccaccagggccactggcatcccagccaggttcagtggcagtgggtctgggacagacttcactctcaccatcagcagcctgcagcctgaagattttgcagtttattactgtcagcaggattataacttacctcccacagtgattcaacatgaaacaaaaacctcaacaagaccatcagtgtttactagattttaccagctgcttcctttacagacagctaatgtggccactcagttttag

SEQ ID NO: 7323 - DNA, 820 bp, Homo Sapiens
  XM_496741
atggaacacaggtcttgcaggatcacggaaaaccttcttggagttgtcttgacaccactgatgtcgagtgtctgggtgcttcacagccaggtacccgcacaaggcacttgctggcaatggcaggaggcggacgtggggtgtcgtgcaatagggctagtgaattaccagatctccgtcaagtgcagtaaccagttcaagttggaagtgtatcttttgaatgcagaaaacaaggtcgtggacaaccaggctgggacccagggccagctgaaggtgctgggtaccaacctctggtggccgtacctgatgcacgaacaccccgcctacctgtactcgtgggaggtgtggctgactgcacagaagtcactggggcctttgacttctacacactccctgtggggctccgcactgtggccgtcaccgagagccagttcctcatcagtgggaaacctttctatttccacggcgtcaacaagcatgaggatgcggacatccaagggaagggcttcaactgtccgctgctggtgaaggacttcaacctgctttgctggcttggcgccaacaccttctgcaccagccactatccctacacagaggagatgctgcagatatgttaccggtatgggattgtggtcatcgatgagtgtcctgctgtgggcctgatgctgccatgagtccctgctgtgcacccgctctgcctggccagccctcgggccacaccgtgaccctctgtcccttccctcctggcccgctggcaactcttcaacaacgtgtctatgcatcaccatatgtgggtggtggaggaaccggtgctcagagacaa

SEQ ID NO: 7324 - DNA, 1518 bp, Homo Sapiens
  XM_497029
cagcaatattgaaattaggccaattaataactctataaaggcctctgtgttcaagtgaaagtaagagtcacacatctcttattataaatctaaagtgagaaatgattaagctgagtgaggaaggtatgttaaaagccgagacaggccaaaaggcccaggctggtctcgaacgcctgacctcaagcaatccacctgccgcagcctcccaggtagctgagattaaaggcatgagccaccatgtccagcttctatgcattattttaaatggagtattgaagactctattactgtagaactatttctaacttcaattctgtcaatatttgggtcacaggccttaatgttattacacgctagtctgatgctcatggccaggacattttgttttcctgttggacataaacaatctcacagaatatcaacttcagaaggttaatctgagaccgtgataagtgcaaacaaaaacaagggcactttataatgttgtctaagtgcagataaaaaacaaggtcttgatgccacccacaaaatacttaataatcatattgctcctgctttctgacagcatccaatctaaagtcttcactttctgagatcctgtccgaaatcaaccaattaaagcccaaatcgtataatagtttctctctaactcctcccactgagatgacccatagtaccccattccttgctgcaatgtaattacaagtgtgctcctggtggtctttaactgaagggcactgactgggtactggtgaagttccccgcaggaactgagtcagaccccatctcagggccctgcagaagataggtgcctgctctaaggcgtggaccctcgcgacagccctggcccgtcttgacgggcgagggttactgtacttgtcccaatcgtacagatgagaaagctcagactcagggccagcaaccccggtcccagcggagcgcccggcacgcgccgacacttcagcaccagtcgcggtggccaccactgtgcgcggagatggctgcgacgcgtgcgcagatctcgatcccaaactccctcctgccagaatctggacccgaatccacccattgcccattttccgctgccgctggagagaatctctgaggtccccaggacagcctgcctgcacggaagagatgcctcctcaggaaatttgtgcacagagataacacaggggatatgccatatgaagatgaaggcagaattctacaagcccaggaatgccaaagattgccagcaaaccaccagaagctaggagagaagtgtggattagattctttctcacagccctcagaaggaaccagccctgccaagaacttgatctcagacttctagtctccagaactgtgagacagtgcattttgttctgtaagtcagccacatggtttgtggcactttgttatggcagccctaggagatgaagacaatatgcaacatggtatgtccattataggacactgtgggctataaatgtgttctttggcctgaagaaataaaacttggtggtccaagttgat

SEQ ID NO: 7325 - DNA, 1971 bp, Homo Sapiens
  XM_497182
atgcgcctttcgggtactgtgagcggcgtgcgggtaggagcgaactgcaggatctcttggtctccccgcccagaggttgtcgagggcagcctgctggggagagcgggaggtaccaggcatgcgctggggcggtggctccgcacccgagtccctgcaccctccgccacctgcaggccactcaggatatccaaagcgatccacatctccggccctcagcccccacccctgccgcccccgcgcttcctgaggctgtggctcccctggaggaatcacccagtgaagacgggtgctcccagatgtcaccgcctcgtgttcccttggccgccttgcggggaagtcttagggttgaaaatccaggtctgcaatgaatgcattccacagatgccagagcaagtggatgagtttctcgctggtggttcaagtttctggggtggtcaggtgtgctccgttgaacgaagccagttgtgggccgcggcggctgtcccggccgggcagcgtcgccttccgaggtgtcttggcctgcggggcactcgtagcccgccgctttcccaggtgaggcacgtcgtcgcccagcgacccaggttggagtccccgcttcagccgccgcggcggatgcggcggccaggcttctccgggccagggcagcgttgcacgtgtggccccgctgggccccgagcagctgcggcaggtcctgaagcgggtgacgaaggcgcagctgctgccgccgcggcccatcaggccgccctccagcgggaccctggcgccgagcccccgtgcccgccacgcctgctgccgccccagggccgcgcctgcccacggtggcggggcacgcccaggtctctggctcctgggctgggtcgcggcaggggcggagcgcgtgcgaaggcgacgcccccagcccctaggcctcgcccaggcggcttccgcccgcctcttcaacgcgcacgctgctaccgagctgcaggaggccgcgggcgcgagactgggaatgcgcagggcccccgcctggctctacaagcccgggccgcggcccccgccttccccgccgcctcccggcgctccgtgcccgccccacgaggccggcggctgctgctacctggggccgttgctgcttgtgccgtgagcgacggccagccattgtccccgccgctccgtcagccgcgcccggccgcgcgcgcaccggaaggcgcattggcgtcttgcgggctccgggccgggtgggcaggatggcctccacaagccgcatggcgcgcatggggagcctccgttgatgccgccgcgccgccctccgaggctgcatccgcggaagcccggctccccgagcgctccggcccggcccggcgccccggacctgagtgcgtccccatgaaggcgcccgggctggcccaggcggccgtggcagaggagaccccggactgggcgcccgagctctgccccagccccgagtcgcggtcgccggagccgcctgccaaccgccttcaagacttcgacacgctggtcaccgtggggccctgccccgccgctgcggctcgggatcccagcgcggggctgcccctgcgccctgggtctccctggggggcgctcggagaagtagagcgcaccccccagccccggcgagtcccccgaccgaccgggtgccttccctggaacgccgacggctcctgtcggggaccaccctccacccccagcacacacagcactctggggcctgggccatccgacgtcaccaaacttcctgtgggtcacctcgcctggggtaaatcgtgcgctctcccaggcagcggccccagggacacgggcgcggggtccctcaggccagcctcccagtgtgcccagcggcagggtcctcggcggggaatgtacagatttctccaggggctgcaggagcagctgggctccggggtacaggtgttccgtggctttgtggggatgaagacggcggagttggggacggatcctaacatgtcctga

SEQ ID NO: 7326 - DNA, 816 bp, Homo Sapiens
  XM_497642
atgatccctaagctgctttccctcctctgtttcagactgtgcgtgggccaaggagacacaaggggagatgggtcactgcccaagccgtccctcagtgcctggcccagctcggtggtccctgccaacagcaatgtgacgctgcgatgttggactcctgccagaggtgtgagctttgttctcaggaagggaggaattattctggagtccccgaagccccttgattctacagagggcgcggccgaatttcacctcaataatctaaaagtcagaaatgctggagagtacacctgtgaatactacagaaaagcatccccccacatcctttcacagcgcagtgacgtccttctactgttggtgacaggacatttatctaaacctttcctccgaacctaccaaaggggtacagtgaccgcaggtggaagggtgactctgcagtgccagaagcgagaccaattgtttgtgcctatcatgttcgctctactgaaggcagggacgccatcacccatccagctgcagagtccagcggggaaggagatagacttctctctggtggacgtgacagccggcgatgctgggaactacagctgcatgtactaccagacaaagtctcccttctgggcctcagaacccagtgatcagcttgagatattggtgacagttcccccaggtaccacatcgagcaactactccctgggtaacttcgtacgactgggtctggctgccgtaattgtggttatcatgggagctttcctggtggaggcctggtacagccggaatgtgtctccaggtgaatcagaggccttcaaaccagagtga

SEQ ID NO: 7327 - DNA, 216 bp, Homo Sapiens
  XM_497707
atggggaaaaatgcaaaaaagatccgtgctcagctcacagagcagatgaaatgcctggaccagcagtgtgagcttcgggtgcaactgttgcaggacctccaggacttcttccgaaagaaggcagagattgagatggactactcccgcaacctggagaagctggcagaacgcttcctggccaagacacgcagcaccaaggaccagcaattcaagtag

SEQ ID NO: 7328 - DNA, 1886 bp, Homo Sapiens
  XM_498568
atggagcaagccaaaaacaccttccaggcctcaggaagtctcaagttcaaacaaacaactacaaacccagaggaagggagggacgtgctgctggctgtcctgaaacaaagtgggaagttccacgcctgtggctcccgtctgctgccgagctcctcgagggaggaagtgatgaggttgctttgcgtggccggagatgcttttccccaagaggtgttgagcccgtcccaagccagcagctcccaccctctgccccatggctgcttccgaggggtgagaggccacaggaagagaaggtggcagggctggcgctcaggcctgcttgtgaaagcccacatgctgtctggagcaccacatgtgcccttctctcatacaagctttggcttcagcgaccatcgtgaaaacgcggccgtcctctcctggctggtgggggccacttcctccctaagctccgtgggtagtgacagcagcactgggaagccccgcactgtccgactgggcgaccccaacccctctgcgccagccctgctggaccaggtccttgtctccaggtttcccgctgcccaggaggcctgtgtgtccggtttgtcccagcccgggacccgccagggaaggtcgtggctccggtctggtggaggcacctttggtgaatggctgggaaggccacacagctctgcctcagaggtgcaggtgacccagtgctgctccccgcgtgagcatcacacactgccgtccgccacagccttgccgccccatgagcgacctgaaggccgagcccagagccgcgtgtggtcccctgtgcagcgtttaacagaaccttccttttccttctcatttacctggaaaatccccacatacttcattactgggatcgtcagtgcggtcacacacctaactgtatgtgaggatgaccacggcagcggctccctgaggatgaccacggcagcggctccctgctgtgcacaggtgctcatggcggcatacgatcgccgacagcctctgaaaacacaccagctgccaaccagtgccccccatgtcacagctaccacggctagaaaggaacacgagggcggcttacaaaaatcagacgcatttccccacatttcagcccatgatgtcaagcttaagcacagatcactgacggccagcagctcctcctacccgtcccctgggagccccgcgggtgccgcacaagtgcccccgcccttccccccggttccgggtctccacgccctcctggtttgcgggcagccgcgaagccgcgagtggaccgagcgagtgcagctgcctccgcggggccgcgcctggccgccgcctccctttacctccggccgccccgtggcaggtgtagaagctgcagaggccgcagcagcccagcgcgccccttccgtgtggccgcatgccacccgcgccgcgcccagcattccagcgtccaacagagcatgcgtgcaccattccagcatccggcaacaatgcaccagcattccagcgtccaacagagcatccgtgtaccattccggcatttggcaacaatgcaccagcattccagagtccaacagggcatgcgtgcaccattccagcatccggcaacaatgcaccagcattccagcgtccaacagagcgtgcgtgcaccattccagcatccggcaacaatgcaccagcattccagcgtccaaaagagcatccggcaacatcccggtgtccagtggcacatgtgcacctggacgttccagtgtggtgagctttcaggcacggagcaaggccaaagggataaaaagatgaaggtgacgcagtactcccccttatagtgcctacaggccttataggccagacagatctggaaataaataattcataataaaaaataattacagaataagaggcataat

SEQ ID NO: 7329 - DNA, 1001 bp, Homo Sapiens
  XM_498725
cggacactgagcagaaacaacgccacgcccggctccgagtgtcccatgctgccaccactaaaatgccctgatttttggccatatgtgacctccctgggtggcacgggccctaggcacccgtggctgtgcgcctggctaccaccagctcaggcctctgagcaatagcccctgcacggaaaccacgaccagggtaaccccggccgcgccggttcgcgcccagcccggttcaggtgaccaggcgggagcttggcacacctggcgccgtcccctgaccccgccccggaccgggccgcaccccggaacgctctctctgggcgccagcggcggcggtgcagggccatggcggcggcgccagcggtgtgcgcctcgcaggggagcccgccgggtgcaccgtccgcgccggcggccgcgccagcacccgcggccggcctgggccgctgccggatggcgctgctgctggccgtggcgctggatgtggcgggcatggcggcgctgctgaccggcgtgttcgcgcagctgcaggtgcgcggccgcgacttcggggacctgctcatctactcgggcgcgctgctggtgttcctgagcctgctgggctggatcctctggtacaccggcaacatcgagatctcgcgccaggagctggagcgcgactacggcctgcggccctcggcgctcgcccgcctggcgcgcaagctctcccgccgctggtcggcgcccgccgccgcgggccagcgccccgcgcccggctcccggagagcgcgccgagccgcccgcgcgcccccgccgcccgccgccggctcccgccgcgtgcgcctgcagctcgccacgctcgaggccgggcccggggcggcgggcgcgggcagcgagtgaggcccagacaaccccttggctccagctgtcaggaccagactgagatgtgcagctgcccctacatccgtggccagacggacgctccctgtaccccctccctcctcacttggataaaaagcagatttgcctta

SEQ ID NO: 7330 - DNA, 2763 bp, Homo Sapiens
  XM_499022
ttgtgttttttgtagagacgaggtttcgccatgtttcccagactgttctcaaactcctgagctcaaagcagtccacccaccttggcctcccagagtgctgggattacaggtgtgagccatcttgctcattctagtttaaacttttgagtagtttgtgtctcctgattggactcctacaaatacagaattgatgctaggaagggtaccaggagatagacgcacacagatgggatttgggaataggtttggttatccaaggagcagtgctgagctccttgctaatgggatatgggatgctggtgatttccaggaagtgagctcacaatgactcaagctgccacatagtgttgattgtgaaatgccagttgaagcatatgtcctgcgagcttgggggtgctacaagttgaccactgcagcagtaaagatgactctgaagaatggcgtgggatggatcctttcaaatgcacttgagcagcagtctccaaccacagggccacagagctggagctggatctaccatgaaagacttctgaatccaggaagagagactgactgggcaacatgttattcaggtgggaccatccagttgcaggaaaacaagcttaacacgcccactgattctacattatgctcctacctcccggcagcctctccaggcccagaactttctccagtcagcctctacagaccaagctcatgactcacaatggcctatttaggcccataccctacctcacggcagtctccgcagatgagcctactgcctcacaacagcctccacaggcacagctccatcgttacaatggcctctttagacccagctcctgcctcccagccttctctccaggccctgaactttctcaagtcgacctcaccaggcccagctcatgcttctttgcagcctctccaggcccaactcctgcatcttggtggcccctccaggcccagcctgtgcctcccgtcggcctctacaatcccaacatctgcctcacagcagattcttcacgcccagcctctgcctcacagtggaccctccagacccagatggtgtctcactgtggcatcctcaggcgaagctcctgcctttcagcagcctctccaggcccagctcctcctgcctcccagtggcctctttcggcccagcccagctcatgcctcccggcggccttcccaagccccgcttttgacttttggtggcctctgcaggcctcgacaaggcccagcctcctgcctcccgaaggcctgcacaggcccagcctctgcctcacagcggactctccacgcccagctagctctcgcctcactgcggcctccccagtccaaagctcctgcctttcggccacttcggcaggtccagctactgcctgccagtggcctctttaggcccagctcattcctcacaacggcctttccaggccccgtttttcccttccggcagcctcttggcttctaatttgtttatcttttgtgtataaatcccaaaatatggaattttggaatatttccaccattatatattttggtcggtaatttatttggagtgagtttctgcaccatgcccgaattttttattttattttccttattatttggtgttaaacaggtttaatgacagtcatggcaactttttggcacaatgaaaaatatcgcccatgatcaacgtgttctgttctggggaagggggcaaaggcagggtgaatcactttcttaaaaagtatagctcaagttgggagtgcagagggaatggggagaaaaccctcccgctgcctgtgtcgaagtgcaggagcccccacccccatactcacctgagtccagcccctctggggaaagaaggggtgcatgaactccccctagtccacaggcgcctccctgtggcccaaggccctcttcacactccatcttgtagccccagcaggagctattttctgaaaagtgaaaagctctgaaggtcccacaattcatggtatgtacaggggctcggaggagggaaactgcccagctttcccccggcacagctgcaggggtagggggtatagataagaggagcaggccttggccaggcgtggtggctcacgcctgtaatcccagcactttgggagggggaggcaggcagatcacgatgtcaggagatcgaaatcagcctggccaagatgatgaagccccgtctgtactaaaaatacaaaaattagccggacgtggtagtgtgcacctgtaatcctagctacccggaaggctgaggcaggagaatggcgtgaacccagcgggaagaggttgcagtgagccaagattgcaccactgcactccagcctgggcaacagagcaagactcggtctcaaaaaaaaaaaaaaaaaaaaaaaaagaggcaggccttactccgtcccaaactgaaaggattaaatggctttacctgggagaagataaccatcctgccctccgttgctaccctcacatactgtccatgttctcaaggggtactgtgagtcctgggatctttggggttgcccacctgcctgtggtagttatggagacccccaggtgttgaggcagggctggggtgtccccttccaaccaggctgtcaaggccccaactctggggcagaggcagtggcagggcagccagggttgcgccagagcctgagcagattgaggtggggtcaggcagggctgggagtcagggcaggggcagcagcagtggacccgctatgcacacatcttctccaaggtttgtgtgcagaacatcctgcccatgctgccccagcagct

SEQ ID NO: 7331 - DNA, 2141 bp, Homo Sapiens
  XM_925839
gtcagcagaggctttattctagtggaaaaggcagacaataaacatataactgcatgatgatttaaaagcaactgtgataagtgctataacaagatgatgaagtctagggtgttagtagaacaattaacagtgaacatgacaagctcagggtcatcttcatcttctgtgcccccaaatataagtgacctgctcaaagttaaccagtaaaagaggggaaaacaaaactgtcttcctacttagggattctctggtctttggaccaaaccttggaatacaacttacatttgggccaatagccttgttttccctatttatactcatagggaaagccagctggaatatgcatgaatcaacattctaacctcagagatatatttctaaaattcaaaacagaagttatcactgatacttggttcagctgaacgactgtgttcatgaaagttgataccattgccattccttgatttttacaagcatagcaaacttaaaacgctcaacacacccagaatgggcaataaatggatgtgttggcatggtcctcctcgtgctggcacttcaacaacacagcaagctatgtacttttgaacaggggttggaacattttttctgaaagcaatcttcaatcttgcaattttgccaaattcttttattttgccataatctatgaattattctacttggcattattgaatgcaaaataagtttactaagcacctactatgtgccacaccctagggatacagggaaaaataagtctctgctctaaagtaactcacagtctaggaaagaagtcattaacaaataaataactatactttggttattggtcaagtattcctcatacttctttagaatgcccaaagctctcttggcataatgacacagtgaggggtgagggtggggtcatcaaggaaagttatatgggacttttttccccaagaaagggtcttgctctgtcacccacgctgtactgcagtggcgtgatcatagctcactgcagccttgacctccagggctcaggtgatcctcccactccagcctcccaagtagctgggactacaggtgtttgccaccacgcccagctaattatattttttgtagagacggggtctcactatgctgcctaggctggtcttgaatttctgggctcaagagttctgcctgccttggcctcccaaactgctaagattacaggcgtgagctaccgcacccggcccgtattggattttatttatttccttttcttggtgctcatcctccttcacaacttcaagatgggcataagatgtttgacaacatggttcttcattaagtccaactccttatcataatagggcttgggaaatattaaacacgagggcaatcgtgctaacacaaaaatgggcgccccctaaaccttgttacttgtttgctcacttataagaagagccaactcaaaggctcaactgaattctagcactaagattccttccttgctgtagaagatctgtacctggtcacttccattaaagttacataggcgttccaagaagcctcctgcaatacagttgtgactcagccggtatgggagtaatgacggtcctgtggtatttcctgcacccccagagtcccagagtttgttaaggaccgtgtaagaggacaccacgctggcttttcagtgggcgcgtctctcctgggggcatcaccagacaaccccaggcggaagtggcggtggcccatcctcatgcaaactgcagtgtaagaactggggcccgggactcctcgcaaatgtgggacactgacattctgtgatgctgtcccaatgccctttcaaagcgctcagcccccaaattcccaaccaacagccatttcagggaggggctacccaggaccaggcttttgatgaaccacgactgttcggggtgccgtcttgggagagccacgtcagtccctctgagattccaaacggccgacagcggacacctcgggaccacatccaagcctcggggacctgtcaagacgccatcgacggtcctggaccaaatcccgcccgggaagggaagggtcgcgaccggaccctggagacccacggctgcctggcgatctgagcccaccccggcgctgccgtcccgcccccacttccgatcggtcgaaggtcacgt

SEQ ID NO: 7332 - DNA, 1607 bp, Homo Sapiens
  XM_925989
atgggcaggcaacgcgctgagggactaggcagagccgtggaaccgccgccaggtcgctgtcggtccacgccgcccgtcgcgctgcccgcccgctcggcgtcggccgccgccatgggagtgcacgtggaaaccatctccccaggagactggcgcaccttcccgaagcgcagccagacctgcgtgatgcactacaccgggatgcttgaagatggaaagaaatttgattcctcccgggacagaaacaagccctttaagtttatgctaggcaagcaggaggtgatccgaggctgggaagaaggggttgtccagatgagtgtgggtcagagagccaaactgactatatctccagattatgcctatggtgccactgggcacccaggcatcatcccaccacatgccactctcgtcttcgatgtggagcttctaaaactggaatgacaggaatggcctcctcccttagctccctgttcttggatctgccatggagggatctggtgcctccagacgtgtgcacataaatccatatggagcttttcctgatgttccactccactttgtatagacatctgccccaactgaatgtgttctgtcactcagctttgcttccgacacctctgtttcctcttcccctttctcctggtatgtgcgtttacctaaactatatgccataaacgtcaagttattcattttactttttcattttggggtgaagattcagtttcagtcttttgaatataggtttccaattaagtacatggtcaagtgttaacagcacaagtgataagttaacgttaggataggaattggtgttgagggggttgcaagaatattttattttaattttttggatgaaatttttatctattatatattaaacattcttgctgctgcgctgcaaaaccatagcagatttgaggcactgttgaggactgaattattctccaagttgagagatgtccttgggttaaattaaaagccctacctaaaactgaggtggggatggggagaggctttgcctccaccattcccaccccaccctccccttaaaccctctgcctttgaaagcaggtcatgttcactgcgatgctggacactacaggtatctgtccctgggccagcagggacctctgaagccttctttgtggccttatttttttttttttttttttcatcctgtggtttttctaacggactttcaggaattttgtaatctcataactttccaagctccaccacttcctaaatcttaagaactttaattgacagtttcaattgaaggtgctgtttgtagacttaacacccagtgaaagcccagccatcatgacaaatccttgaatgttctcttaagaaaatgatgctggtcatcccagcttcagcatctcctgttttttgatgcttggctccctctgctgatctcagagtttcctggcttttcctccctcagccacttctcacccctttgctgtcctgtgtagtgatttggtgagaggaatcgttgctgcccccttcccctagcaccatatatgagtctcaagttttattattgcaataaaagtgctttatgctggcttttctcaaaaaataaataaataaataaataaataaaa

SEQ ID NO: 7333 - DNA, 5052 bp, Homo Sapiens
  XM_926137
atggcgaggaagctcagtgtattggaagtccttctgatcatcttctgcttaattgtggtgaccatagatatcctcttgctgcttcttgtgttggaggaaacttcagcacactttgaagaaaactatcaagaatgtgaaaaacaatccacagattcagggaacatacctgcagatgatgtatccgatgatatctgcagatggcaatataagtgctgctggtcgcctgtggcagatgccaatgtccctaggtgcttcttcccctggaactggggctatgaagccagcaatggccatacaaatacaagcacaggatttactgcccagttgaaaaggttgccatcaccatctctgtttggaaatgatgtcgccaccacccttttcacagctgaatatcagacatccaatcggtttcattttaagatcactgactttaataacatacgctatgaagtttcccatgaaaatattaacctggttgatgggattgctgatgcctccaatttgagctattacgtggaggttactgataaacctttcagcatcaaaataatgaggacaagcaacagaagagtcttgttggacacgagcatcgggcccctccagtttgcccagcagtacctgcaactgtctttccgactgcccagtgccaatgtgtatgggctgggagagcatgtgcaccagcagtaccgccacaatatgacctggaagacttggcccatcttcacccgggacgctacccccaccgagggcatgattaatctgtatggagctcatacattcttcttgtgccttgaagatgccaggggctcctcttttggagtatttctgatgaacagtaatgccatggaggttacccttcagccagctcctgcgatcacttatcgcacgattggaggcattcttgacttttacgtattcctaggaaacactccagaacaagtggttcaggaatacttggagcttgttggacggccattcttccctccctattggagtcttgggttccagcttagtcgcagggactatggtggcatcaataaattgaaagaagttgtaagccgaaatcgtttagctgagataccatatgatgtccagtactctgacatagactacatggatggaaagaaggatttcactgttgatgaagtcgcttactctggtctcccagattttgtcaaggagttacatgacaatggacagaaatatcttattattatgaatcctggcatctccaaaaactctaactacgagccctataataatggaagcctaaagagagtgtggatcttggggagcaatggctttgctgttggggagggatatccgggaccgacagtctttcccgattataccaatccagtatgcactgagtggtggacagatcaggtcgctaaatttcatgatcatctggagtttgatggagtgtggattgaaatgaatgaagtatctagcttactccaagcttctaataaccagtgtgaatccaacaacttgaactttcctccttttcttcctagagttctggatcacttactttttgcaagaactctctgcatggacacggagtttcatgggggccttcattatgacatccacagcttgtatggccactccatggcaagaaccacaaacttagccctggagaccatcttcatgaataataggagcttcatcttatcccgttctacttttgctggatctggcaaatttgctgctcattggctgggggacaatgcggccacatgggatgacctccgatggtctatccccactatccttgagttcaacctgtttggcatccccatggtaggtgccaacatctgtggttataacaacaatgtcacagaggagctctgcagaaggtggatgcagcttggagcattttatccactaccaaggaatcacaatgggcctgggttcagggaccaggatcccgctgcctttggtgttgattccctgctgctgaaatcctccagacattatctgaacatccgctacaccttgctgccctatctctatacccttttctaccatgctcacacccggggagagacggtagcaaggccccttgtacatgagttctaccaggactcagccacgtgggatgtgcatgagcagttcttatggggacctggactcctcatcacgcctgttttatatgaaggtgtggacgaagtgaaagcatacatacctgatgccacctggtatgactatgagacaggagtggccatctcatggaggaaacagttggtgaatatgcttctcccaggtgacaagataggacttcatctgcgagggggctacatatttcccactcagaagccaaacacaaccacagaagccagccggaggaattccctgggactcatcatcgccttggactataagagagaagcaaagggggagctgtactgggatgacggtgtatctaaagatgctgtgactgaaaagaagtatattctatatgatttctctgttacctctaaccatctacaagcaaagattataaataataattatatggacactgacaacctcatgttcacagatatcacaatcttgggaatggacaaacagccagctaattttatcgtcctactgaataatgttgccacctccagtccaagcgttgtctacaatgcttccacaaaggtggtaaccatcactgatctccaaggactggtactgggacaagaattctctattaggtggaatcttcctgtcagtgacctggagaagttcaactgctaccctgatgatccaacagcctctgaggagagttgtaggcagcgggggtgtctttgggaggacacatctactcctggagtgcccacctgttactatgacaccatccctaattatgttgctagtgatattcagtacctgaacaccagcatcactgcagacctttccctcccgatggcccctgagtcagctgctgctgccgcctctgattctctctctgcaaagatcagcttcctccacctgaaagtgatctatcacacagcaaccatgctgcaggtcaagatctatgaccccactaataaaaggtatgaggttccagtaccactgaacacccctccccaaccagttggtgaccctgaaaaccgtctgtatgatgtcaggattcagaacaatccttttggaatccagattcaacgcaaaaactccagcactgtgatttgggattctcaactccctggcttcatcttcaatgacatgtttctctccatttctacgcgtctgccgtcccagtacatctatggctttggggaaactgagcacacgactttcagaagaaacatgaactggaacacatggggaatgtttgctcatgatgagccacctgcgtacaagaagaattcctatggtgtccacccttactacatggcactggaggaggatggtagtgcccatggagtgctcctgctaaatagcaatgccatggatgtgacattacagcccactcctgctctgacataccgcaccacaggagggattttggacttctacattgttttggggccaacccctgaacttgtaactcagcaatacacagagttgattggtcggccagcaatgattccatactgggccttgggattccatctgagtcgctatggataccagaatgatgctgaaatctccagtttgtatgatgcaatggtggcagcccagattccctatgacgtccagcatgtagacatcgattacatgaaccggaagctggatttcaccctcagtgccaactttcaaaacctcagtcttctgattgagcaaatgaagaaaaatggcatgagatttattctcattttggacccagccatttctggcaatgagacacagtatctcccattcattagaggacaggaaaataacgtgttcatcaaatggcctgacaccaatgacattgtctggggaaaggtttggccagatctgcctaatgtaattgtagatggatcccttgaccatgaaactcaggttaagctttacagggcctacgttgcctttcctgacttctttcgtaatagcacagctgcgtggtggaagaaagagatagaagagctctatgcaaaccctcgagagccagagaagagcttgaagtttgatggattgtggattgatatgaatgagccatcaaattttgtggatggatctgtcaggggctgcagcaatgaaatgctaaataacccaccctatatgccatatttggaatctagggacaagggcctgagcagcaagactctgtgcatggagagtcagcagatcctgccggacagctcccccgtggagcactacaacgtgcacaacctgtacgggtggtcccagaccagacccacatacgaagctgtgcaggaggtgacaggacagcgaggggtcatcatcacccgctccacatttccctcttctggacgctggggaggacaccggttgggaaacaacacagctgcatgggaccagctggggaaatctatcattggcatgatggagttcagtctctttggaataccttatacaggagcagatatctgtgggttctttggagatgctgaatatgagatgtgtgttcgctggatgcaactgggggcattttatccattttccagaaaccacaacaacatcgggacaaggagacaagatcctgtggcctggaattcaacctttgagatgttgtccagaaaagtcctagagaccagatataccctgcttccttatctctatactctgatgcataaagctcacgttgagggcagcacagttgtccggccccttctccatgagtttacggatgacaggacaacatgggatatagaccgtcagttcatgttgggccctgctatcttaatcagccctgtgttggaaactagcacatttgagatctctgcttattttccgagagcccgttggtatgactatagcacgggaactagcagcacatcaacaggtcagaggaaaatcctgaaggctccccttgaccacatcaaccttcatgtcagaggaggctacatcctgccctggcaagagcctgctatgaacactcactccaggtga

SEQ ID NO: 7334 - DNA, 671 bp, Homo Sapiens
  XM_926208
tgagggtctgaggcagctagtagccggagggtcaccatgaagttcaatcccttcgttacctcggaccgcagtaaaaaccgcaaacgttacttcaatgccccctcacacgtgcgcaggaagatcatgtcatccccgctctccaaggagctgcggcagaagtacaatgtccgctccatgcccatccgcaaggacgacgaggtccaggtagttcgaggacactacaaaggtcagcaaattggcaaggtaatccaggtgtacagaaagaaatatgtcatctacatcgagcgggtgcagcgtgagaaggccaacggcacgactgtccacgtgggcattcacccaagcaaggtggttatcaccaggctaaaactggacaaggatcggaaaaaaattcttgaacgcaaagccaagtctcaacaagttggaaaagagaaaggcaaatataaagaagaacttattgagaaaatgcaggaataaatagaacctgttgtgcaaccacggtttaaccggagattttgaggctagggtgtgtttctttcgaacttttcggaatgtctggaacatttcatttcctgttttgttacctgtggctctgtaaatctacttttgcaattttaagtaataattttatgaataaaaatgggaaatgcttccaaaaaaaaaaaaaagaaact

SEQ ID NO: 7335 - DNA, 2645 bp, Homo Sapiens
  XM_926239
gtaagagaccatcgcaagccagggatggggtggcgcacactgtgatctcagccagtctggaggctggggctgggcggtgggggggtgcgggtcgcttgtgtctcagagctggagctgtggtgtgcgaggccgaggtccgcgcctataaatggccgctgcgctctggcccgggcaacactgagactccgactctggaaaacaacaaaacttaaaagacgaacacagatggaagtttgggagcctggtatgcggtaagcactccgcaggtgtcagccgccagcccgcagtcccggacaggtcaggggaaggcccgcggtatgcagcaggctgccggcttcagtcactgcctggtggaaaacaagcctgtctttggggccagccagctaacaagtgagcccttcaccccatctgaaggcgaagcacccaaaggggcaaccgtggacggctaaataaaaatcaagactcctgggacgccttctcgggacacattcttaaagagatacgtgcctgaggacgttgtgtgtatttctgtgtaacaggccaccccaaacctcagagggcgaaaacctctcttcactgctcatgactctgtgggcctgcagcttaagccggttcagctgggacggcttgcctcggctccatggggtgtctgctgggcccacttacaggcaggcgccccgggcagatccgggccacatgtcacccacccaccgcaggctggccgggcctccctcccgtggtggctgggctccgtcggcagcaagaaaaagcaaatccccatggtgcttccctccatctccccaggagggtgagatggccggggcctgagtggacgtgaggcaccgcacaggggacgggcacggcaagcatggttcatcggggctgtcactgcagaagtcttccacaggccttcgctgaggtgcgggttggtgtggggaatacaagggaactccccagaatggaggctgcttgtgcaagtttcaacttgtcctttttctccctccagagcagcagagagcggatggcgcccaaggccgggaccctctgctgctcccacaggcctctcaggcggctctgcaggaccagccagcagcctctgatgctcccttcctattccatggcttcaggtgccatcctctccacagagacggtttctattgtgacgctctccctgacttggaagaatggcactgggaacattccccttggtgctgatgtcggggaggaaagcagtttccagtcgcctggggccaggacatggcgttcccagctgttgtagagcatgaagcaccaggatgcccattcgggtgcctgctgagatcaggctctttgagaaggaatcctgtggtcgcctgaggaagtccaaaaaaatttcgaggacatctcagccatccatcccctgttcactgtggaggttgaacaccggggctcctggaggggggccctgggtctccacagaagtgctggcagccaccatccacttcctggccttccgtgcccgctccacctctgttctgttgtttactgtctcctttgtgggaattatggaataaacaatcactctggtgtcctggaaaataaacctgatgctggagggcttgagtgtaggaatccagctgggctcccactgtctgccccagggtgcggagttaggctttgcataagcatgtgagatgccaaccgctatgaaatgtggtctacacagcaccaaaaatccatttcccacgttttcccttcagtgcagttaaatggcatgaccctgtgactgtctcccacgagaagaactaaaaattacgctggtcctgccaatgcctacaggatacggtggcacaaaatgatttccacggtcttaggatatagacccaggccgactcgagagattaagtggatttcaaactgtggtcttgagccttctgggaactgcccgaaaggtggggaaggcgccagcctcggagtggtccagctgcccggcctgttcacacactggcctttcagttgaagacagtgttcaaagcttacccgtgtaaatgccactgatctgtgaacccccttcctgtcatgcccagggcctggcagactgtggctagaacggtgggatcagagcagtgggtcacgtgacctgcgcacgggtgtgctggcctccctgggccgcggtggccaggacagccttcctttccctttccagccacacagggcaatccgtgtgctcagatttctgtctcatcaattacagagcgagctgccaacctgctgtgctgagactgtggcctggtcttggtcctggtgtcctagggctgatgactgaccacagcctttgtgcttttgaagcctatttgactatagtccttgtgtgcaactaaaaatgtagctttaaacaatcttgctttgttttaattctgcccaatctatttgagaaaggacactcacaggtactttttagattgtagcctaaagtggattattgatttccttgtttctcaaacgtcaggaggagcataaaactgctaataagaggtgaccaatattcggtgataccgtgatttgagacataatattttttgccctatattttaaaaataaaataagaagacatgagactggagtggcaaaaaccagatgttgccaaaccattcagtcagcagctg

SEQ ID NO: 7336 - DNA, 406 bp, Homo Sapiens
  XM_926249
atgcgttcccaagtctccgccctcctgaccgcagcggctagaggttccattgcagacccggaggccgtggctgtggttcgcggcggtgctgtcgcgggcgccctggcgcagcccacgcaggggctcctgagggtccgcgaggccgggaggtccgggggtcgggaggtcccggggtcgggaagtcggtggaccctgcaggccagtggggaggggagacataagacatcagtcagtacatgtgaggtgtgcattggattgatccagaaagtcaggacgactccaagtggaaaggcctccagagacaggagacagtaaaagaaatggcctctctcctctgtcagagtggagtcccgagctcccagaaatgccacatgatggacaaacgcttgggggaaaaaaaaaaaaa

SEQ ID NO: 7337 - DNA, 1578 bp, Homo Sapiens
  XM_926382
cccggaggacgacgccgcggccgcagccatgggtgctgggcctgcaggggcgcgggggggagggggacgctaggacctgcggagccgggcgggagagagggctgccgggaccggccctagacactgagccgcggtgggatccccgccggctctgcgaggcccctgcgagcgccagggaggcgcctcgagggagccgggcagccgccggccacttcaagggggcccgccacttcacggcggtcgaaagagccttgggggcacatctcggggtgcggtgacccgcccggcgcatttcgggggtcggggcgcatttgccaggagacatctggagcccggccctgcttctgtcgggctccagggtacccctggatggctgcgctgtgccctcgccggccgcccgggcgccacagcggctgagttcgccgggatcgccgggccgccgccgcccttgccaccggctgcatgctcggcgcccgggtcgcggcccacctggacgcactgggccccctggtcccctacgtgccgccgccgctgctgccctctatgttctacgtgggcctgttcttcgtcaatgtgctgatcctgtactacgccttcctcatggagtacatcgtcctcaacgtgggcctcgtcttcctgttcgaggacatggaccaggcgctcgtggacctcggcgtgctctccgaccccggctcgggcctttacgatgctgactcggagctcgacgtctttgatgggtacttggagtagggtctcgactgccgttcccctcttccctccacgatccgcaacccacgccctggaccagccgcccagatcatggcgccacagctggttgggggcaccatctggacggggatggttccccaggaggagaccctcccctgcctccgaggcctgcctgctcccctcaaaagcttcgtgccaacagagaggttcctgtttggacccaggagagtggaagagagattgggactgagtgctgaggttgggaaggcacctgctcccacagaagggggaacgcaaggggcgtcccaagacctcatctgcctgcagcgtcacaccgatggcctggccttgtcttctgattatttgcaactgccatggatgtttacaggaacccagccagagtttgcctccctgcacttcatcccagagcgcacctgcttcccccacttcaccttcggagaggacacttcaaactgcggacacacgcaaaagtaactcccagctctgtttgatgtgagttgagccttcaggccagctgggtttagcccgaggctggtcttagatgcagcgactgtttcagagtgactcagaagaaaaagaagctgaggaagctgttggggggctgaggatgggattctcgcttcttcatttcaggttactcgttcctcagcaagttggcaaaacagatatcatgctggtgagtgccacgttactcccctggctggaaatgcttttctgaaagtatgagtgtcgtgcctacttaattctgataaacctgtttaagcaatacttaggaggctgacttctttggattaaaaaaatgtatgcaactccaaaaaaaaaaagaaa

SEQ ID NO: 7338 - DNA, 165 bp, Homo Sapiens
  XM_926491
atgcctctgcccccccgggccgcggaactctcctggggcgaccccgagtcccaccccgctgctccgtgccgtcctcgcagctcgagccctcctccagcccagcagtgctcccgcagcgtctggccgctggtcgtcggcagacgaaagggcttgaaccgcggctga

SEQ ID NO: 7339 - DNA, 5142 bp, Homo Sapiens
  XM_926789
atgcccacgttgcccaggccttcacagacccccaagccggaaccgccgggaaaacgattgccaaccggccacaacacccaggcagagacgcggggagaggctgaccagaagaaaggccgacgtggcgccacttttggggagactcacccgcacaccgtccgcgcacgcctgaggctgggatcccgcgctgcctccccggcgatctgtctgaggtttcttcctcctggggtttcttcctgctggtggaccctccgcgaatcccggcctccggagaccgtcctggtaactgccctggccagggctggtctcagccccgactctgacgcacgatcacacagggctcctacttcgccaagtctcagggacccatacccgggcaacggtggcggtcactgtgaccaaagcggcggctcgggcctcgcgcatgcgcactggcgaggccgactcacccgccccaccccccttactcggcagagtcaggctgcggaccctttaaaaaatggcggcgacgcggcggctgcggggactggtgcggcggtgctggaggttgcggcggcggctgcggcgcagccccgggcggcgggtgggaagaggactaccagaggggcctgcgggagacccagggtcggacccataggagtcctgtcgtcaggacctccttgatcggtcttctgcttgggttctcggtgaaggaggagcttcgggtgttggctgggctgcgcggactcctcttgggatccgatgatggatcccacccggtgatcgggaatggggttacaatgcagtgaggcggaaaggctctcgccggggcacagaaagatccccagggccgcaaggcgtgctgtcgcctgcaaaggcactgacccacgagcccactgcctccctccttcctgggtggagcaggggcctgccttcatctccaaggcccgggggctccggcatctcgacgcggcttctggagacacgggcaaagagagacagaggctagtccgagccggagccagtgtgaccacacgtggcactgacgtcccccaagagcacatgcagtgagcctgtgtctctgaggccgtagtgggcgacgacgagacggacagtgatgtccaggcctgcgcccgggggccactggagacctgcccctcaaagcggaggaaacgccaagctcacctgaaaacctgcgagacagggcctgtgcacgagtccagtactcctacttcgccaagtctcagggacccatccccgagcaacggtggcggcgcagagaagagcacggcgccggcgcaggtgcagagagacaggaggctgatggggggaagttgaggcacctggggcagagaaaaaaatgcattgccaagaggtttctgggtcatctactgacgaaaatgtcttcccatcagcccttgcgctggtccccagggaccctggcatccgtcgttggcgcccagggtgcgcgtcgggccactaggggtaccccaactcggacagaaggcccatgagttgaatttgaagtttgtgggaatagaggtgaggcaccaggggcagaaaaaaaacaggagacctcgcctcagacaagcggggcctgggtcccccatggatgaaagtgccttcccattatgctgtaccctgggcagagtggacagtgacgaccctggttcgagcccagggtgcgcttcgggaccgcttgcggttaccagaaagtgaacaaatggtccatgagcggaaggtgaggcacctgaggcagagaaagtaaagaaacgcgccgccgagaagcagtgcctgggtccctcacggaggaaattgtcttctccttagcccgttcgcttggcagtgaggtccctggcgtccctggtttgatcccagggtacgcctcgggccactagtgttaccccaaggtgggcagaaagcccataaggggaaggcgaggcacctggggcagagaaaaaaaaaacttcgccgcagagaagcgcggcctgattccccacggacgaaagtgtcttcccatcagtccctgcactgggacccggggaccctggtgtccctggttcgagctcagggtgtgcctcagccgctacgtgcaccccaaggggagctttgggagcacaaagcccatgagggaaagtgagttttgagggaggagtggtgaggcacctgtcacagaaaaagaaaaaaaaacaacccgcgccacagagaagcagggcctgggtcccccacgatgaaaatgccttcccatcagctcctgctctgggccctgtggaccctggagaccctggttcaagccacgggtgggcctcgagcccgctaggggtacccccgtgcgcctctctgcgcctgcgccggcgccctgtgcctttgcgagggcggagctgccttctcctcagcacagacccggagagcattgccagggcggagctgagttctcctctgcacagacttcggagatacagcgaagcggagcatgttctcctcagcacagacccgggagggcgggccaggggcaccgcgagggcggagctgcgttctgctcagcacacacccgggagacaccgcgaaggcagagcagcgttctcagcacagaccttgtgggcactgcctcgctttgggactactcggagccgcatcagtggtgaataaaatccttcctgtttgcagcccttaataatcagggtcagagaccagttagaagtgttcagtgtggaaaacgggaaaccaaaagcccctctgaatcctacccaccgaggttctccccagccaaggcgaggcggccgcagtgcgagatccacaccgcagcctcggaagacaagcgggcagaaatcccatgaggggcagttgaggtttgaggaaggcgaggtgaggcacctgtggcagaaaaaaaaaaaaaccgcaccacggagaagcagagcctgggtccccaacggacaaaagtgtcttcccattagcccttgcgctgggcccaggtgaccctggcattcctggttcgagaccagggtgcgcttcaggccgctaggggtgcccaaaagcgggcagaaggcccatgaggggaaggtgatgcacctggggcagagaaaaaaaaaaaaaaaaaaaaccgcgccgcctataagcggggcctggctcccccacagaagaaactgtcctcacatcagcgcttgcgctgcgccccagggaccctggtatccctggctcgagcccagcgtgcgcctcggcctgctaggggtaccccaaggcagacagaaggcccatgagggaaaggtgagacacctggggcagagaaaaaaataaaaaaactgcgccgcccagaagtggggcctgggtcccccacagacgaacgtccctacccatcagccctgaactgggccccggagaccctagcgtccctggctcgaaaccagggtgcgcttcaggcccgctagtggtacctcaaggtgggcagaaagcccatgaggggaaggtgaggcacctggggaaaagcgaaaaaaacaaaaacaaaaacgtcgcagagaagcagagcctgggtccccgaggaagaaagtgtcttcgcatcagcccttgcgctgggccccggggaccctggtgtcccagtttcgaacccagggtgtgcgtctggccactaggggtaccccaagtcggacagaaggcccatgaggggaaggtgaggtttgagggaggagacgtgaggcaactgtggcaggaaaaaaaaaaaaaaaaaaaaacacgccgcggagaagcggggcctgggtccccaacggacgaaagtgccttcccatcagcccctgcgctgggccccatggacactggcgaccctggttagagcccagggtgcgcctcgtgcccaataagggtatcccaaagcgggcagaatgctcattaggggaaggtgagacacctggggcagagaaaaaaaaaaaccgcgccgcaaagaagcgggacctgggtcccccacggatgaaagtgtcttcccatcagcccctgccctgggccccatggaccctggcaaccctggttcgagccccaggtgcgcttcgcgcccgctagggttacccagaagccggcagaaggcccatgagaggaaggtaagacacctggggcaaaggaaaaaaaaaaccgcgcttgcagaaaagcggggcctggctcctccacggacgaaggtgccttcccatcagcccctgcgctgggccctggggaacctggtgtccctggctggaaaccagggtacaccttggacccgctaggggtaccccaaggagagcagaaagcccatgaggggaaggtgaggcatctgcggcagagaaagaagaaaaaccgcgcagcggagaagcggggcctgggtcccccactgacgaaagtgtctttccgtcagcccttgagctgggtcccgaggacgctgacatccctggttcgagcccacgctgcgcctcaggctgctacgagtaccccaaggaggaaagaaggcccaaaagtttcagctgaggtttgaggcaggagagatgaggcacctgtggcagaaaaaaaaaaaaaaaaaaaaaaaaaaaaaaaaaacgcgcagcggagaattggtgcctgggtctcccagggacgaaagtgccttcccatcagccactgcgcttggccccatggaacctggcctccatggttcgagcccagggtgcgcctcgggccgctaggggtaccccaaagtgtgcagaaggcctatgaggggaaggtgaggcacctggggcagagaaaaaaaaaaaacacctcgccgcggagaagcggggactgggtccccccacggacgaaagtgtcttcccatcagcccttgcgctgggccacagggaccctggcttccctggttcgagcccacagtgcacctcgggccgctaggtgtaccccaaggcagacagaaggcccatgaggggaaggtgaggtttgagggaggagcggtgaggcacctgtggcagaaaaaaaaaacgcgccacggagaagcagggcatgggtcccccacggacgaaggtgccttcccatcaggccctgcgctgagccccgtggaccctggcgaccttgactcaaacccacggtgcgcctcgggccgttaggggtaccccgaggcaggcagaaagcccatgaggggaagttgaggtttgagggaggagaggtgaggcacctgtggca

SEQ ID NO: 7340 - DNA, 2317 bp, Homo Sapiens
  XM_926836
tttcaaattagagaatgattagttttgtctgggtcttaaaagtaacgaatgtgaagatagacaagatcatttagaaaagatatgttggagaacacaacctatcattgctcagaccctgaaaagtggctgcaatgctgcggcgttccaactaaaaagaagcttcaaaaatcctgccctagttacagaacacaaggtctggcaaattcaaaacataactgtagtgatgtatccaaacctacgttttcagtaacacttctaaaaaaacagaacaaactgcatctcatataatatttatgttctctttgaaaacacacaaatatttcctatgaccagcatggttgccaaacttgctctttcctgccaaaccatggccttttctttcctgaacaagccactgaggaaaatgctgagattctcttggcttatgtggctgaggaagaggaagccctgccccaggccctggtatccagtcctcaaccttcccgctgagcagaccaaggacaaatgtgaaatgaacactgtcatagttcccagggcaaccaaaagcactgaacagatacactataaggtaacattggtcttttttgtaaaatttaagtacaggcatttagagtttcctgaaatctcaaatgcggtgttaggtgcctcactggtagacattcttttatcattccttaacaaaaagaatatttcctcgctacagcaataatccctcttgcctttttttttttgagatggagtctttttctgtcgcccaggctggagtgcagtggtgcgatcttggctcaatgcaacctctgcctcctgggttccagtgactctcctgcctcaggctcccgagtggctgggattacaggtgcccgccacccccatgcccggctaatttttgtacttttagtggagatggggtttcatcatgttggccaggctggtctcgaactcccaacctcaggtgatctgcctgccttggcctcccaaagtgctgggattacaggcatgagccaccatgccccaccttgcctttatctctctcctgcttcacgtacattctcagggtctaagaccaagaagagacaacatccacccagctggtatgagatatcttcaggtaggatagagggagaaggcagcctatgatagtccttggatccttgctaggggcagaaacatggtgggtcatgattccttcacttcttccagactacactgctaaacgtgaatgttagcaaatgctcagattattttttgacacttgaataatttcactcgactactttatgaccaacaatttctttgtgtgtgtgtgtgtgtgtgtgtgtgtgtgtgtgtgtgtgttcttttttgttgttggagaaagggtcttgctctgtcacccagggtggagtgcagtggcacaaacatggctcactgtagtctcaacttctcaggctcaagtaatccttccgtctcagcctcccacgtagctgggactaccggtgtgtgccccatacttggctaaactttctgtatattgttattgatgtggttggaagaaatgacagcttttacaaagtacataaaggcactaatactacttgtataacttctaaggagacccctaaagtttcctatatttttatcccaaagggatgctctataacttatatataaaagtacctggggccaggtgaggtggctcatgcctgtaatcctagcactttgggagactgaggcaggcagactgattgagcccaggagttcaagaccagcctgagcaacatggcaaattcccaactctacaaaaaatacaaaaattagctgggcatggtggctcatgcctgtagtcccagctacttgggaggctgaggtgggaggattgtttgaggccaggaggtggaggttgcagtaagccaaggtcatgccactgcaccccagcctgggccacagagggagaccttgttttttttttaaatgcacctggcatataacagtgcttaataaaaattttaagacaacttaagaaaaacaagcccctctaagattatctacattgactttgtgcaatccctctcattatgtattggtgaactcagaggaacaaaatgtttcaagtctaagtcacataatcagttgataaatctccaaagcaaacccgtcccctcccattatctagaaggctactttataactgaataaaaatcatgtttgacttgtccttttggcacggctagttacgttaaaggtacgtaatggaaaataaactagagctggctggctatggaggaaagagatagatctaactccgagcaagcaataccattcgcatggtagggcaagc

SEQ ID NO: 7341 - DNA, 6564 bp, Homo Sapiens
  XM_927029
cacgctcagagcagaccgctagcaggaggcaggatgtgatagtctaagaccctggaagctgacggccagagggagggaagggtggtcacagaggagaggcaaagcaacgggaggtggaggatcctggaggtgtctgcaaggagaatacacagcagcgaggggctgcagaagcggacccagcgacttctgcgctgacgcggggcgggcgggagagaggaagagaggggagcgcggtggcgctgcgagctggccccgccggggaaggggctgccatgtcccgtgagcggcccccgggcaccgacattccccgcaacctgagcttcatcgccgcgctaacggagcgcgcctactaccgtagccagcggcccagcctcgaggaggagccggaggaggagccaggcgagggcgggacgcggttcggggcccgatcccgcgctcacgcaccgagtcggggccgccgggcccgatctgcaccagccggaggcggcggggcccgggcgccccgcagccgtagcccagacacccgcaagagagtgcgtttcgccgacgcactggggttggagctggctgtcgtgcgccgcttccgtcccggtgagctgccccgggtgccccgccacgtgcagatccaattgcagagggacgccctccgccacttcgcgccctgccagccccgcgcccgcggcctccaggaggcgcgcgccgccctggagccggccagcgagcccggcttcgccgcccgcttgctgacgcagcgcatctgcctggaacgcgccgaggcgggcccgctgggcgtggccgggagcgcgcgcgtggtggacctggcctacgagaagcgcgtgagcgtgcgctggagcgccgacggctggcggagccaacgcgaggcgccagccgcctacgccggtccggccccgcccccgccgcgcgccgaccgcttcgccttccgcctgcccgcgccgccgattgggggcgccctgctcttcgccttgcgctaccgtgtgacaggtcacgagttctgggacaacaacggcggccgtgactatgctctacgtgggcccgagcacccgggcagtggcggagctccggagccgcagggctggatccactttatctgagacgaggcgcctgcggccgacggcggaaaacaccaaaggcacccgggggcggggcgacccgatgtggcggggaggagtaggagagaccaggattggcgggagcggtccaagggagtcaagccggggagggcgaaaagggaacctggccactgctccttggtccttggcattatgacgggattcccttgtcacctctgacagttcctggctgcggtgtccgcggactggctggggagtgatgacagaagggatggaaaccctattttcttttctccaagaccatggttggtctgcttccctcactcgggctccttgacagtcttctagaagagagaaggaggaaaagaagcagttcctgatgttacaaatgaacaaggatctcccagccttagtctttgagaaaagatggctgaaagagaggaactctccaagtcattccgcaaacaaatgcccatttaaacatcatccttgtcttgtgaagaaaacaggaagaatgtcatgtaccatgtggatcaccttcagttcaaagttgcagcaaagtgaagaaagaaactactggaagccacccagcaatgcactgtttagtcatcaattaggagcccatgggaggataatagggagactgggtggaggctcagtgtgtaataatctcttgtctaatgtatgtgtgtcactgccatgttgtatgaacaatagtgagggctcacatttacttaacacttgtgtgcgcaaatctgggtttttcttcctttccagaactatgactcgatcataaaatctgttttgtttgcatgcatgcccaaaacaaccctgtaagtagaacattgtcattatctctgttttagagatgaggaaacaggctcagagaagctcagaaatttgttcaagatcgcacagctagtaaatggcagaagtaggattgtgaacccagggaatctccagagcctctgtgtaaccatgatgttatattttttttcctctttaaaaacaaaatttaaaaccttgctataatctcttattaggaaatgatcatagtttctgactgtgctctgccttcccatcctgccaatctcctggactggcttggagaagacagggggcccccgagcttcatctgtgactcgaaggagtttgctgctgtctcctgtgtcagtgtcccatctatgcaggatcagcacaggacccccctcaccttcccacttacactctagcctttccatacattggaattctctcctggccctagccagcgctccacacctgttggtgtgccacctccctccctcttcccccactggccttgaacaggcaaaccccctaatgtcgccactaggttgggtccgtgactaggacacctgctagagggtctgtgcttgggccttttctaggaatcccgatgttactgggtaagtgccaactctgtgggcagaatgctaatgataatcctgttccctgacctctttctcagaagtaccctggctcactctccccaatctcagctttatagaacaacattttggtcttgattattcccatatcaagctgccccagggcttcggtaagctgttagttgccccactgcctcaaggctgggtctggctgagctacttcttaggcacacaaatagtgggtgtctccttggaacctgacacaaaactatcagtgctaccaagccttgtaaaatagggaggaaactaatatttcttgagtggcttctgagtgcctggtgctttcgcggctctctggagagattccttgccctgatggctttggtgtgtactcctctcccaggacttcagcactgagattttcccaaccccctggcttttcctcaccttgggttgagttgatccggcactaccacaaaccccaccatctgcaaaccaaccaagattaggcagtatgccctttccgtcttgcactgctcttccaaaacttccatctgtatttctcacaccctcagtaagcaaagctgagtgtgcatggacagagctgcatccactgctttctcccagcgggtgcagtctaatctgacacggggaacactaggagtttagcggaatcttcagccaccctattaatgtgttacgcattaggcattgtagtggaaactcctctgatggctcatgactatatgaacaggagcaatttggaatataacatgtcagctgtggactgggaagtgccgtgagagaaaacactacctgggtcataggcttgggtccctgaggcaacccagcagggacactgttgcccattcctctcatccagactgcaggtgtcttcctacacctccctgtcccatagcctccgtcctgttttttgtttgtttgtttttctttgtgaatgtagaaaaacatttcatcatgagccctagctcctcagttttccacctaacacccacattcccttgtttctaactgccgtgtttttctggagcctgctgggatctttgcagtttgcaggtcatagaatcagacatgaaaaggcttctcttccgacgtcattggttcctggctcctttacagatgagaacacaggtccagaggtgagaaatgactctagcagggtcatagaatttgttagtgcagctcaagatgggacttaaactcaggcctcctgatcacccattcccaggctaggaaacaggtctctgctcggtgtggtggttcatacctgtaatcgcaacactttgggaggctgaggcaggagcattgcttgagcccaggagttcgagaccagtctgagcaacatagtgggaccctgtctctacaaaaacttttaaaattagctgggcatggtggcacacatctgtattcccagctactcaggaagctgagacaggaggatcgcttgagcccaggagttggaggttactgagctatgatcgcaccactgcactccagcttggtgacagtgagaccctcaaaaaaaaaaagaaaagaaagaggtctctacacaagcccgtgattcttcatggcaagggataacatcagaaatgtttcattttctgctattagtttccattcctttccccatccaggcataaagagaaacaaaagacaatgatggtattctctgtgtcctcagctttggcacttttgttgatgttgctaaggagcagtgaccttgctaaaaagactgaataatccacccactgaatagctaacctggggaggaaatgaaaatttcctttgtggatctccccaaatccattgttgtcaccaggccctcccagaacctcctcagttccttcacagtgcaaccctgtgtacttggcccgcaacccaatagtattgtgcctcacttcaccttccatgggcaactgccctcccttctggacataaaacctcatattttaaataaagttgaaatatgaaaagaaagtatgtcataagatattcagaagtattgtgtgttttgggctaagggcagcaagagactcagaggcaagattccctccttgactcaatttcttggtcaccttgttttttgtgtgtgtgtgtccagaaaaatttaataagtttgcttaaattattataaagttgaaccactgaaatgttcactgaaacattttgacttgcattaatgctttacttccccacctacatttacattaaaaattcacacacaaatgaaaattgaaaactgacaacacctgacttctgtctcctatttttctgctcacaatcgtatacttaggtaccttttgaccccatggggaaaaaatatctaacattcagaactaccaatgacaggaagcagagactttttttttttaagaatgaagtttcccccatcataatggattcttaagcacattcttcacgcatgcggcgtgctagctggatgtcttttgacataggtgttacacgtttggcatggacagcacacaggttggtgtcttcaaaaagccaaccagataggctttgcttgcctcctgcaaagcaccactaagctgcactctgcaacggcagatctgttttaaagtcctgagcaatttctcacaccagatgctggaagggaagtttgcgaatcagttcagtagatgtctgataatggctaatttcacggagtgccacagtaccaggcctgtaatgacgaggtttcttcgccctccagtagagggcgcactcttgtgagcagttttttttttttttggtggggggaggggtgtgtgtgtgtagttttttgttttttgtttttcctgagagtcatgctgtcacccaggctggagtgcaatggcgagatctcgtctggctgcaacctctgcctcccgggttcaagtgattctcctgcctcagcctccggagtagctgggattacaggggcgtgccaccacgcccggctaatttttatatttttagtggagacagggtttcaccatgttggccaggctggtttcgaactcctgacctcagatgatccacccgcctcagcctcccaaagtgctgagattacaggcgtgagccatgcccctggcccccagtttttgtatttttttaatagtcgaggttttgccatgttgggcaggctggtgtcgaactccaggccccaagtgatccgcccgccttggcctcctgaagtgctggaattacacgcgtgagccacctcgcccagccggagcagcttttgtaggcagttgcttcctgggtgctttaccttcagtcaatttgtgagcaatctgctttgtgtgagactgtgagagagacctccttacttactccccttcttcggctagagctcagggagctagagatggtcctggttagagaactaccttatttcctaaaagtcctattctcattctgctggagtcccctctggctatgcaaatgctgaggggaaggagttttggaggacttaggcagtcctgatgtaagacactcccaacaggatcctatcatcattttgggtagtgggaaatttaccagggcccagctcttctctggaacccagcaccaactgctttaaccaacagttaaagggaagagcttgggaaaagccctgcgtttctccttgggtggggaaatccttccttaagaagaccatctgagttacattctgcttcttcttcttctttttttttttttgagacagagtctcactctgtcgctaggccagagtgcagtgacgcagtctcggctcactgcaacctctgtctcccagcttcaagcgattcccctgcctcagcctcccgagtagctgggactacaggcgtgcgccaccacgcccagctaatttttgtatttttagtagagacggggtttcaccatgttggccaggatggtctctatctcttgaccacgcgatccgcccacctcggcctcccaaagggttgggattacaggtgtgagccactgtgccggcctacattctgctccttaagtgctggatgaaagagcaaagcccttatcaaaggcaaccccctaaggcaacggaggagaaatat

SEQ ID NO: 7342 - DNA, 594 bp, Homo Sapiens
  XM_927053
atgatcttcagtcaagaactgaggataagccaagccctggggatcagtctgacaataatcatgggcaacctctccaagtgtcttttcattcagggaaaactgttgtttgccgagcccaaggatgcgggctttccatttagccaggatatcaatagccatttggccagcctctcaatggctagaaacacgagccccactccagaccccactgttagagaggctttgtgtgccccggataacttaaatgcgagtattgaaagtcagggccagattaagatgtacatcaatgaagtgtgtcgggagactgtgtcacgttgctgcaactcatttctgcagcaggccggattaaatttgttaataagcatgacagttattaataacatgcttgccaagtccgcttcagacttgaagtttcctttgatatcagagggaagtggatgtgctaaggttcaggttttgaaaccgctgatgggtttgtctgaaaagccagtcttggcgggggagttagtcggtgcccagatgctcttctcattcatgtccctctttatcagaaatggaaacagagagattctcctggaaacccctgccccataa

SEQ ID NO: 7343 - DNA, 985 bp, Homo Sapiens
  XM_927112
cgattggcttgagcgattggaaacaagatgcaggaccccaacacagacactgagtggaatgacatcttagacaagaagggcatcttacccaccaaggaaagtataaaagaatcagaagagaaggcagaagaggagcagcacatccttcagcagtcagtggtgacaacatacgaagatatgactttggaagagctggaggatcatgaagacgagtttaatgaggaggatgaacatgctattgaaatgtacagatggcagagactcgctgaggggaaagcaattaaactgaagaataaatttggagaagttttggagatttcagggaagtattatgttcaagaagttaccaaagccagtgagggcttgtgggtcatcttgcacctttgcaaacgaggaattcccctctgtgccctgataaatcagcacctcagtggacttgccaggaagtttcctgatgtcaaatttatcaaagccaattcaaccacctgcatacccaattatcctgataggaatctgcccatggtatttgtttacttggaaggagacatcaaggctcagttgatcggtcctctggtgtttggcggcatgaacctgaccagagatgagttggggtggaaactgtctgaatctagagcagttaagacggacttggaggaaaaccctaagaagccgattgaaggtgtattgctgtcttcagtgcagagctctgtccccatgaggagggacagcgattccaagggtgactgaggctgcagctgctatcacatgctgaactttcttgtgacaaattgtctggatttctttaagaaaaggaaaagcaagaatgaatccttctggtttttagttttgtataaattatgtttcaaatctttacattttagaaataataattgctggaaattctgttaaatattttggaactctttttttaaactatagtatttcctctaaaaaaattaaaaccagctattggtatggcaaaaaa

SEQ ID NO: 7344 - DNA, 411 bp, Homo Sapiens
  XM_927177
atgctcttctcgctccgggagctggtgcagtggctaggcttcgccaccttcgagatcttcgtgcacctgctggccctgttggtgttctctgtgctgctggcactgcgtgtggatggcctggtcccgggcctctcctggtggaacgtgttcgtgcctttcttcgccgctgacgggctcagcacctacttcaccaccatcgtgtccgtgcgcctcttccaggatggagagaagcggctggcggtgctccgccttttctgggtacttacggtcctgagtctcaagttcgtcttcgagatgctgttgtgccagaagctggcggagcagactcgggagctctggttcggcctcattacgtccccgctcttcattctcctgcagctgctcatgatccgcgcctgtcgggtcaactag

SEQ ID NO: 7345 - DNA, 6742 bp, Homo Sapiens
  XM_927193
ttatatggtttggctctgtccgcacccaaatctcatcttgaattgtaacaattcccatgtgtcaagggtggggccaggtggagataactgaatcatggaggcagtttcccccatgctgttctcatggtagtgaataagtctcatgaggtctgatggttttataaatggatgttcccctgcacatgctctctcctgcccaccatgtctgactaaattttgtatttttactagagacgggctttcactatgttggccaggctggcctccaactcctgatctcgtgatccgtccaccccgacctcccaaagtgctaggatcataggcataagccaccacacccggcctcttttttttctttttcttttttttatctggagactgagttttgcactcgttgcccaggctggagtgcaatggtgcgatctcagctcactgcagtctccacctcagcaggagagcaggaatcttcagtgatccacgggcaaatatgcagccattgtgggcacctgttcctcccgcgacctttgtgcccacgtctctccctccagtacctactgcacggccccccacgtccgcctcctgccattgccagcaggtgccttgcgcgggtacctggctgcgcttattcatccattatggtcgctctgtcactggtgccattatgtgctcacatgcccactccctcaggtttagaagtcgcgttgcccggcaacagaacaatctgctggcttagcctttggccaagttggcagctggacgaggacgctcagagcccagctcttgagagttcaagtatccgacagttccccactgctcccaggagcggttacccgggcactctgtgcccctcattcctgtttgggccaaggccgaggacctgcgagtagggctcagttgcctggagccccttcagcccatcccccagttcactttgcttgtgggatctccccgttgctcctgcccctggactgagtggcaggccatcctacaaacacccgcacactcgacatcagtggtgtcaagacaactctaagaaggttttccgtgatcctgcaagacctgtgttccatcctggtgattctgtcttcaatttcactgcacaggtaccacagtaagccagtgctgtgtgctccgagttccagggcatcccccagcccagccactacactgagcacaaggactctgtggggcccaggagcaggtagtcacccctttggggtccacaacacccggctgtccccagacttgtgtccagggaagatagtgttgagggccctcaaggagagcagggcagggatgcctgagcaggacaaggaccccagagtccaagaaaatcctgatgatcagagaacggtccccgaggtcaccggggatgcacggtctgcattttggcccctgcgggacaatggaggcccctctccctttgtgcccaggcccgggcctctgcagacagacctccacgcccagagctcagaaatcagatataaccacacatcccagacatcctggacgagctcgagcaccaaacgaaatgccatctccagctcctacagctccacgggaggcttgccggggctaaagcagaggagggggccagcctcatcccgctgccagctgaccctcagttactcaaagacagtgagtgaggacaggcctcaggctgtctcttcgggtcacacacggtgtgaaaagggggcagatacatcaccagggcagacaatcgccccaacgggtggctcccccagatcccaggattctaggccccgtagacgcaagattcccctgctgccacgcaggcgaggggagcctttgatgctgccacctcccttagagctggggtaccgggtcacggctgaagacctgcacctggaaaaagagacggcattccagcgcatcaacagtgcactgcacgttgaggacaaggccatcccggactgcagaccctcacagccttcccacactttgtcctcacttgcaacaggggcttcgggtgggcctcccgtttctaaagcacacactatggatgcacagcaggacagacccaagtcccaagactgcctggacctagtggcccccctagcatctgctgcagaggtccccgctacagctcccgtgtctgggaagaagcacagaccaccaggacccctgttctcctcctcagatccccttccggccaactcttcccactcccgggactcagcccaggtcacctcgatgattcctgcccccttgacagctgcaagcagggatgccggcatgagaagaacaagttcggctcctgcacctgccgcagcagcccctcccccctccacattgaaccccacgtcggggtcactactcaatgcagtggatggaggcccctcacatttcttgtcctcagccacagctgcagcacgtgtccagaggtcagaagtgagatataaccagagatcccagacctcccggaccagatcgtgcctcaaacgaaatgccagctccagctcccacagctctacggaaggcctccaagaagtaaagcggaggagggggccagcctcatcccactgccagctggcccacagttcctcaaacacagtgagtgaggatggacctcaggctgtctcttcgggtcaccgctgtgaaaacaaggcaggtacagcaccagggcagacactcgcccccaggggtggctcccccagatcccaggcctctaggccccacatcaacagtgcactgcacgttgaggacaaggccatctcggactgcagaccctcacggccttcccacactttgtcctcacttgcaacaggggcttcgggtgggcctcccgtttctaaagcacccactatggatgcacagcaggacagacccaagtcccaagactgcctgggcctagtggcccccctagcatctgctgcagaggtccctgctacagctcccgtgtctgggaagaagcacagaccaccaggacccctgttctcctcctcagatccccttcctgccacctcttcccactcccgggactcagcccaggtcacctcgctgattcctgccaccttcacagctgcaagcagggatgccggcatgagaagaacaaggtcggctcctgcagctaccgcagcagcccctcccccatccacattgaacaacacgtcggggtcactactcaatgcagtggatggaggcccctcacatttcttggcctcagccacagctgcagcacgtgcccagaggtcagaagtgagatataaccagagatcccagacctcccggaccagatcctgcctcaaacgaaatgccagctccagctccagctcccacagctctacggaaggcctccaggaactaaagcggaggagggggccagcctcatcctactgccagctggcccacagttccccaaacacagtgagtgaggacggacctcaggctgtctcttcgggtcaccgctgtgaaaacaaggcaggtacagcaccagggcacacactcgcccccaggggaggctcccccagatcccaggcctctaggccccacatcaacagtgcactgcacgttgaggacaaggccatctcggactgcagaccctcacggccttcccacactttgtcctcacttgcaacaggggcttccggtgggcctcccgtttctaaagcacccactatggacgcacagcaggacagacccaagtcccaagactgcctgggcctagtggcccccctagcatctgctgcagaggtcccctctacagctcccgtgtctgggaagaagcacagaccaccaggacccctgttctcctcctcagatccccttcctgccacctcttcccactcccgggactcagcccaggtcacctcgctgattcctgccaccttcacagctgcaagcagggatgccggcatgagaagaacaaggcctggcacctcggctcctgcagctgccgcagcagcccctcccccctccacattgaaccccacgtcggggtcgctactcaatgcagtggatggaggccccgcacatttcttgggctcagccacagctgcagcacgtgcccagaggtcagaagtgagatataaccagagatcccagacctcccggaccagatcgtgcctcaaacgaaatgccagctccagctcccacagctctacggaaggcctccacgaagtaaagcggaggagggggccagcctcatcccactgccagctggcccacagttcctcagtgagtgaggacggacctcaggctgtctcttcgggtcaccgctgtgaaaacaaggcaggtacagcaccagggcagacacttgcccccaggggtggctcccccagatcccaggcctctaggccccgcatcaacactgcactgcacgttgaggacaaggccatctcggactgcagaccctcacggccttcccacactttgtcctcacttgcaacaggggcttcgggtgggcctcccgtttctaaagcacccactatggatgcacagcaggacagacccaagtcccaagactgcctgggcctactggcccccctagcatctgctgcagaggtctcctctacagctcccgtgtctgggaagaagcacagaccaccaggacccctgttctcctcctcagatccccttcctgccacctcttcccactccggggactcagcccaggacacctcgctgattcctgcccccttcacacctgcaagcagggatgccggcatcagaagaatgtttcgtgttcgaaattgtttgaggggtttgggtttatttttgttggttttttcttttttttttttgcttacgtgggcatccttcagcttttaataatctgaaaaattctatttacccattgtcaatgtgtataaattaatctcagtcaattttatacaataaaaggtgaacttttatccatcaaacaataatttaacaaaaaatgtaccggaagaagaatgttcattacaaatataggaaacataaatattaccaaatattggcaagcactaaaatgttcagaaatataagtctattacagttatagctctctcaagcaaaaaaacagcagagaaaaacttagtttacctgaggggctatttatttacttagggatttgttaaaaggtcaaatggggtcacacagaatactaagaagagctgttcatccaggcctcactaagaactcttcttcatgcagtagctatatggtaatatgacaactgctcctacgacccaaagaggaactacagcaactactctttagcatctgttgctcccaactctgctttgcaattatatgactcaagcattctggctccgttaactattactgctgttactcccaagtaaattccctctaaaaaataaaaatttttaaagctgtaatttaagctctctgctgcctcatgacttcaattccatcagagttacgcattgtttcctctgtacatctttgctctgcttccattgctaattccctagaaaagtgttgtatattcaaagttccaaagaaacagaatatccaagacatcaccaatcatccaaaacatagtgtaggaggccacagttaagagaagcaagaccattagctctttttataggctcgagaacaacaggatgctttggtcctgtatcagcaggacgctttttgggtagatcctactgccaccctactatcgggtagatcctactgtcaccctagctatgggcacatgtcagagtcccatgtaataaaggagacaaaaggaaaccaccacgagtataaactaagaaaagtactccaaggtttctaagaatggagctgtataactcactttgccccgtttgttacttctccacggtacttaccaccacctattacatacattttgtttatagtcagtcttcccccattagaatgaaagttccgtgaggataggactatacagtcagccctcagtatccatgggggactggtttcaggatctcctgagggtaacaaaggatactcaagtccctgatataaaatgacatagtatttgcacatcacctttgcacatcctcccatatacttcatatcaactctagatcactcataatatccgatgtaaatgtcatgcaaatagttattgtactatattgtgtaaggaataaggacaagaaaaaagtctgtacatgttcagtacagacgcaatttttttttccaatatttccaatccttggttgccttaacggatgtagaacccaggaataagttctggtgtcctattgcatagtaggatgagtatagttaacaataacatattatatatttgaaaatagccagaagagtagattttgaattttctccctacagaaaaatcattatgcaaattaccctgatttgatcattacacattgagtacatgtattaaaacatcacattctaccccatatatatgtacagttattatgtgtccataaaaatttaatgtcaatgtgtgaaataaaatgaaaaaataaaaatttttaaagctgtaattatctccatctggtaggaatatatacaatctgaaataaaaaatatatttgtaattgttaggacaaaatagattatacattaagtctgcaaattataaattataaaattctcacagaacctgaaaaattattgatactgttaaatatttaaaaagctgtccttggagagaaagaaacctatcagatttacatcaacaagtgtaatatgtcagcctattaccatctgctacagactgcatgtttgtgttccctcaaaattcatatgataggcccggcgcggtggc

SEQ ID NO: 7346 - DNA, 1610 bp, Homo Sapiens
  XM_927253
acctaaggagtcgcagttgtgaacaggttagagttacttgttattggtaaatagccactatggagactaaggaccagaagaaacacagaaagaaaaacagtggacccaaagctgcaaagaaaaagaagtggcatctgcaggatctccagctaggagacgaagaaaatgcccagaagagaaatgccaatgcttttgcagttcagtctgctgtgtggatgtctcgatcctttcacaggactctggatttgaagacacaaaagcatcatattccagtggttgatggaactccactagagccgccaccaatagcggtagtggtgacggggcctccaaagttggaaagagcactttgatataatgcctcattcggaacttcacctggcagaagttcaccgagatcagaggccctgtgacgatcgtgtcaggtaaaaagcgcagactcaccattattgaatgtgggtgtgacattaacatgatgattgatctggctaaagtagcagatctggtactgatgcttatagatgccagctttgggtttgaaatggaaatgtttgagtttctaaacatctgtcaagcacatggctttcctaaaattctgggagttctcacccacctcgactccttcaagcataacaagcaactgaagaagacaaagaagtgattaaaacacaggttctggacagaagtttaccaggttgccaaactgttctacctttctggaatggtgcatggagaatatcaaaaccaagaaatccacaatctgggccattttattacagttatgaagtttaggcctctcatggcaaacttttcacccttatatcctggcagacatttatttttctaggatggaagatttgacaaacccggaggatatccaaacaaacatcaaatgtgacctgcaggtgtcactttatggttatttaagaggagcacacttgaaaaataaaagccaaattcacatgccaggggtagaacattttgccatgagtgacatcagtttcctcccagacccttgtgttcttcctgaataacaaaagaagtgctgtttaaataagaaggagcagctggtttatgcgcctgtttctggagttgagggtgtgctgtatgacaaagacgctgtctgtgttgaccttggtggcagccacggttttcaggcatcagacaaggtggggctcacccatgagctggtccagagtctcatctccacctactccaccattgatgccaagatggcttcaagtcgagtgatgctgctttccaattccaaaccacttgggtcagaggctatagataatcaaggcaaccttgcatcccatgggcccttcttctatggccacatgtctctgtggctctttccttcccccttctcttccactgttaaggactcatgtgcttacttagtcctgaatggagacaccgtcatcatccacatgagcccactgtccgaatccgtgagtggtgtcattgagcaaacacaaagtcgggctcatccaaggatgagattttgccagagaaaggacgagcagcaagtcagggagcttaaggtggtggaaaggaaatccctcacagcaactggcaccataatcaagacaatgtttgcagaataa

SEQ ID NO: 7347 - DNA, 4440 bp, Homo Sapiens
  XM_927344
atgaagaagcccctgccaaggaagagcccgcttctcagtgggacaccgggaagacgcagatctggcagctgggcgacaggcttcggagcatttccgggcgtcgcgggactccccgccgacaggagggcggttgccgagcctgtgacatccgcggagaccagcagaccccgggtgtggaggacgccgcaggaagggaactgcgtggctgggtttggccacaaaaagcggagggcactcacccgagcggacctcggctccggagaatccgtttccgggtcaacaaaaaacgtcgcgcgaggggcggggccccgcgtgtctgcgtcgggttctgttggagtgcgttcggtgtgccgtgggtccgcgctgcttccacccaacttcctgttaggacccacccgaggacgggtcaccatggctttggagcacctggtagtgtggcatgtccacagtgaagaccagagtttcgttgtccttaagactgacctggggagacgtggctgcaggccattgaggaagacggcaccgaaagcgaaggaagctcctgctcctcctaaagccgaagccaaagtgaaggctttaaaggccaagaaggcagtgttgaaaggtgtccgcagccacacgcaaaaaagaagatccgcatgtcactcaccttcaggcggcccaagacactgcgacttcggaggcagcccagatatcctcggaagagcacccccaggagaaacaagcttggccactatgctatcaagtttccgctgaccactgagtgggccggaagaagatagaagaaagcaacatgcttgtgttcttcgtggatgttaaagccaacaagcaccagatcagacaggctgtgaagaaggtctatgacagtgatgtggccaaggtcaccaccctgatttttcctgataaagagaacaaggcatatatgttcgactggctcctgattatgaagctttggatgttgcaacaaaattgggatcatctaaactgagtccagctggctaactctaaatacatgtgtatcttttcaccataaaagaataatgtttttcataagagtgacaacttaattagaatcaaatctataagctttaagattttacatttctgtaagtataatattagcttatttgactagaactcaagcagaataggaatttatgtttgttttatattcaagtgataactttgaagacatagttttattacaccaaaaattttatattaatctcatttaagtaagttttatccaaatcatgttaacttaaaaaacatttgatcagttcctatatttctaggagtttggtgaatatttatttataaatggttatttttttccaagccaagttagaatagagcacttttataggattttataaatgaattttgcagtgctatccggagttaagaaaatatcacatatacattacatacagtaatagatatacaaacacaaatagagatttcatagctttcatcctgaaatttcagccatgaatcaggcataaatattctgatggttaattttagacatctacttgattggattaagaaacatacatagctggtcaaacaatttcagccatgaaacaggcataaatattctgatggttaattttagacatctacttgactggattgagagacacacgtagctggtgaaacacaatttctgggcatatctgtgaaggtgtttctggaagacactgagataaccctgacccagtgtggatgggcactgatatggtttgcctgtgtccccacccagatctcatcttgaattgtagttcctataatccgtacatgtcgtgggagggacccagtgggaggtgattgaatcatggtggttgttactgccattctgttttcatggcagtgagtgagttctcatgatccaatggtttcataaggggctgttcccctttggctcagcacttcttcttgttgctgccatgtgaagaaggacgtctttgtttccccttctgccatgattgtgaggcctctgcagccacgtggaactgtcagcccatttaacctctttgttctttataaattgctcagactcaggtatttcttcacagctgtataaaaatggatgaatacaggcaccatccaattggttgagagcccagatagaataacaaggaagaggaaaggtgaattatctcctgaaattgaaacatccttcttctcctgcccttgacatcagaatcagtgtctcagagctttggcctcagaatcagagttacaccattggcttccctgattctgagtcctttatatctggagtgagtcatgctgccagctttcctggttctccaacttggagacaggctattgtgtaacttctcagcctccataattatgtgaaccaattcccctaatgagtcttctctcatctatctacatatatcctattgattctgcctttctggagaaccctgactaatgttattacaataatacaaaattcactagtttatatagaagacttggtttttgtctttgccccattttgtatttgtattataactgtgtatctggaaaatggaacaagtttttatcttcttcatatgagggccaaagcttttttctcaccaatatttttggagatttttaagattttcttttgtttggacatacaatcttatggaggctgagaaataaaattttttctattttatttttcagccccagatgtttgcttttgcagattcttgagcacattgagagcatggagagcactccaaggcatggagtggggtgcctaaagtttcagtgattacagggagttgagagactcaactgggaaaggaaaagtctaaaaggaggcaatttggaagataaaaattttctcaaaggagcgattaaatttctaaataattcttagtaaaatcatgtaaacaggaaaggaaatagaattagttccatattggtggaacacatagcagaggtttgagaagggagaatttagtgtgtatgttaaccccatcatcccatcctagcaaagctgagaactcagttttgaaagttactctgtggtcccctcagccaagagtggttctgttcagtcagttgggagcttataatttaatttttgtttatcaatgctaatgcgaaagagtacgctgtcttcatggcagctgaatttgcaagaaactccttggatggggttaatggcagctgtatttttctgggagctctgctttaattggacaaagtaagttgtggtaagatttcttcttttatcttcagtatctcaaatgttttcatttaaataatctttataacaacttttgatgtctgagtggattcccatacagtcatctattgtaagactttctgattccgtttttttcctttggtcattatgaatagggcttatgtaaataattgcatggtagcttttgattggaaataacatcaaagtagttgtcaaaatacttaggaatgttatttttggattgtaaggtgagacttgtttagctttggaaaaaaatgcccaacttgtaataggggaggaaaaataattttctgttttcggaattcttagatgggatgctctgtaaaaactgacagattaaaatgagaaaaacagaaaagttgaaaaacacgtataccttatggttacatgggagatattcagggaaaaatgagtaaatctccaacaggtggctttcaattcaagcataaatactgtcttcaacttaaagaaagaagatttgaggtgcagtattggggagttaaccagcaaaagcacattagacaagggtaaggttcattatacagacttaagtccatgcattctccattgataagactctttagtgatttagttatccttctcttcttggtgtcgagagaggtagcttttaaatggtgatttcctttatagatgtaaattttccttacacaagtgtaacttctctgttttcacaacttcctttgttagcatttttttttttcaaaataattagcttggaataattcttaagccaaagggacatattttggggttgcatattctggtttcctaccattatattttggggtggcatattttggtcttatacactgtgttccaccggcaatgaaaagagttcttgtttttcctccagcaatttgtcatttgttaaagagtttagcagttctaagagatatagaccagctgtgctatctttttgtggttttcagttctctagtatgttgagcatctttttgtaagtgtacttgccatctgtagatcttctttggtgaggcgtctgttcagatctgtgtgcatttttaattgggctgtttaacttattgtttagttttaacaattttttatgtattttgaatacaaattctcagatctgtattttgcaaatattttcttcaatatgtggcttgtcttttggttctcttaacaaggtctcttccagagtataaactgtaaatatt

SEQ ID NO: 7348 - DNA, 999 bp, Homo Sapiens
  XM_927460
tgcggcgcagccccaggcggcgggtgggaagaggactaccagaggggcctgcgggagacccagggtcggacccataggagtcctgtcgtcaggacctccgtgatcggtcttctgcttgggttcccggtgaaggaggagcttcggggtgtcggctgggctgcgcggactcctcttgggatccgatgatggatcccacccggtgatcgggaatggggttacaatgcagtgaggcggaaaggctctcgccggggcacagaaacatccccagggccgcaaggcgtgctgtcgcctgcaaaggcactgacccacgagcccactgcctccctccttcctgggtggagcaggggcctgccttcatctccaaggcccgggggctccggcatctcgacgcggcttccggcgacacgggcaaagagagacagaggctagtccgagccggagccagtgtgaccacacgtggcactgacgtcccccaagagcacatgcagtgagcctgtgtctctgaggccgtagggggcgacgacgagacggacagtgatgtccaggcctgcgcctggggggccactggagacctgcccctcaaagcggaggaaacgccaagcccacctgaaaacctgcgagacagggcctttgcgcgagtccagtactcctacttcgccaagtctcagggacccatcccccagcaacggtggccgcgcagagaggcgcacggcgccggcgcaggcgcagagagacaggaggctgatggggggaagttgaggcacctggggcagagaaaaaatgcatcgccaagctgtttctgggtcatccatgtacgaaaatgtcttcccatcagcccttgcgctggttcctagggaccctggcatccgtcgttgctgcccagggtgcgcgtcgggccactaggggtaccccaactcggagagaaggaccatgagttgaatttgaagtttgtgggaatagaggtgaagcaccaggggcagaaaaaaaacaggagacctc

SEQ ID NO: 7349 - DNA, 2176 bp, Homo Sapiens
  XM_927470
tttctgtagagccggcgttttgccctgttgcccaggagtttttcctttaatgttctcctgctacttactaattcactttgtcaccctgtgagctcataagagcagagagatagcaacaggagctaaaaaaactctaagctgtgaaaaaatattaaatatgaaatcatgatagctattagcttaatttgttttaggcaaattgcaaagtaattttttgggaatcagtgtcccactgcagtgattccatatggggattcctaattcccagtatgtttttaaaataatttgtaaacacctagtacaaacgcatgatatgaaattcaagaggtgggaggatcacctgagcccaggaggttgagacttgcagtgagctgagttcacaccactgcactcgagccttgatgacagaatgagactgtctcaaaaaaaaaaaaaaaaaaaaattgtccttaagtccatgtggacccctgactaggtttgtgccctagacagccttcctctgagggcagttcaggtggtgagactccagctttaaatggcctctagagaaatttcactaacctgccttggtgtttgaccctgtataacccctttcttctggaggtccctttgggtggcagtagatacgggatttggtgtctgacagctctggggacagatcccagctccaaatggcagagtctctacagattacaagccaaatacttagcactatgtgctgatcttcaggaagtcagtctatatttcataacaagtcacatggggataatgaaggaatggcctaaaatgctctcagtaatattcctgagtcatccctcagggctaggcttggtgttaggcatggcggggaagggagcagagctgtgtgcagaggaagatgcagttcttgccttgtcagggtccctgacctgatggcgacccatggtggagtcttcatagtgacagacaccactgtaaaagcagatccaggttgtgcaaccctcaaagcaggtctcctcactcaccgggatagatagactattggccgtacctgcatccaccgcttgccatggtttcgttgtgggtggaggatactttcctgtcccctggctttgggtttgcccacgtggcttgctctggccttggaatgaagcagaaacgaaaggctgccagttccgagcccacgtctgaagtcgccttaggtggttccgcgggccccgtgcgctcccaccttcacccagagggccttctctggtgcagccgctgcttcttcagcctccgcccaaaaggaacggagccccctggccgatccgcaggcctacagggagccacagagcgcagcggctggaccagcgttcaagcccaagcacaggcctgcgagaaccttgttccagccgccgtttaggatggttgattaggacgcgttgcagtggcggtagctcaccaatccagtgcgtgcacccgctcctttattaggctatagagccagtggctcccacagggacctgatacaacagtgcgttaaataaggagcatattgagctctcatgtcgtaagccagtggagaagtccagggctagtgtgggggctccggcgggggctgtggcccccatccgcatggagcctccccatggttcacaggtctcagtcttcggagccttcggccctgcgagcccgaacggtccacagggcggcgccagaccctctttcgaacgccatcctctaaagcctcggctccaaccggttccacttcttcaggctcaggattttcactcttctcgaatgggggtggccctcccccaatcttctgagtcgcaacagcatctccctccctccaggacctcagagccagagctgggcgagaggccctgacctccggggtagggtggaagcgtccctgtgaaggtgcagtcctgcctcccatccccaggcgccgggcctctcccaccctcagcgccctgctcacctccagctgaagatgccagggcacctctgcttcctccctgccctctctgcagtaccgccgagtgtgcataaaagggtttaatataggctttgccgggcgcggggactcccacctgtaatcccagtacgttgagagaccaaggcgggaggatcacttgaggccaggagttcaaaaccagcctgggcaacaaagtgaggcccgtctctgaaaaaaaaaaaaaaaaaaaaaaaa

SEQ ID NO: 7350 - DNA, 4884 bp, Homo Sapiens
  XM_927666
ggaaaactacagtgtgataaaaagaaattcttatcattccttctaaatgcacagaagagtaaagacctaaaagtctgtcaaaaagcaagaaagaaactccccagtgctagtctccagggagctgtcactgtggcagcatggggatgcacctagttcaggatctgaaggagctctgcctttggaatgcatgggagatagagactcggagttgttgtacatttacctttgtttaacagggcaccactgttgaattaacccattcagtcaacaagctctgaatgtctgacttcctatctattccattgtggtctgggtttcctttggtgaaattcaggctcaagtcttagcgaaatgtcagcagtctatactgacacaccagcctcatttacaaaaaggagatattaaaacagtgacagtattttttttttaagctctttacaaatccacgttttatgtattttttaatgacatgagctctccaggaaatgtacctcatccccgcagttttcctccaagtggattcatttgggagcaaactgcagtcactttcacaagagtcctctttgatgtcaggagggatcacgaaaccttgcaatgccatgaactggtccatggttatcatcaaaagttccatgctaagtgcataacttggagctcactataacctttgttgatttccctaaccataaaatcttgttgctatttttttgttgctttttcttttttttttttttttttttttttggcagccttgtaaggagaacttcaccatttcccagcacatccctatgtgtgcgcctattttaatgcacctctctgaaacagagacctttttgttcacaaccataactaaagctggaaagtcagtcttcaggcaaggcgagggaggaaaacatcccattagaattttttcaggaaagacttatggaaaaaaatatctctctcccacctccttttatccccatgagacacagtttcccactgtaatcagggtaatatgcatttgtaagttctgatatgtgatacatttatgtgatggcaaagataagtctgtcttgcatgcaggtactagagttgtgtgggcagggtcatctgaaactcaagcaactcagaggaatatacaaggggcttggggaagaaaatggtgctcccggagcaagtgttggatccattttgcaaaccttcatgttagcagagaaagctagagtttgtttaaacaaaaatagggctgatttcattttggggactcaggagcaacatggtttgtaggcagtcccctcaccccagctgcagggccatgccacagctgtggggacttcacacacctaggctagaactagaggtgtctaccacatcaccctttaagatttctttattaactatttaataatgccatacatttttataaggttagatgtttgtttgaaacatttgtttacattccatattccaataaaatcttattggtattggtagcagatcctactctaaatgtagattctatttttgtcgtttggtctgtgggaacttaaaatacaaatgaaactcttctcttattatagagttgagtttatagagtaaaaaataaataagatcccaaagccaaggaatgcattcagttaaggttctcataccaatgctgcctgcttgcattgcacattctgtatactaatgtaaacatttgttctacctgaaaatcaaaagcaagatgtgagctctttggctaaacctgtattgatatgtcaggcagcaaaactcagtgtttgagattatcaaaagccttctaatatgcccttataggcaatcctgaagcattggttatcatcagggagatgtgccactgcgtgtctttcctgctccccctccaatctcctttatcaccccaccccactcctcagccctccctttttttttttaagttgcctgtctggaccaggcaagaggtgcctactggagggtcttggtgaagcggtaactccattcctttcccttgggtcccccaaaggtaataaaagtacctggaggagaatagtcaggtgattgacctctgcctgtctctctgacggtgatgtaggtgcagacaccgcctgcctgccttgtcctggggttttgtaactgcagctttgacacaggcattcttcctttgaagcacacagcttgcttttccagcacctagacttttacctctcttcatgccttagacttagaccataactgggcttgaaatgctcaccccttcctgggtctggtcttggcacctaggctattcctttccaaactgaagtgagtccagtttcagaccatctcttttcctgtctccaaaaaccatttttgtttccaaacctagctcccccgaaattttaagactatttacctagattcggagatggtcttggagagttccaaaaggggtgtgtgtgtgtctgtgtgtgtgtctgtgtgtgtgtctgtgtgtgtgtctgtgtgtgtgtctgtgtgtctaatatttagactaaaccatggtaaatgtacgcacccagtatccttttcagttagcatattctttcttaaactcatctcagtacttttcatttgtttgcttcattatcttaaacaggttaaaagtgcctatgataaggacttaattatttcctaaagaaaagcaaaaaatgtggggaacagggtagtgttatactatcatctcaggtactgcctatgttcaagaacatagacctggtatggtgagaacaaaaggttcctatgccaaatccagatggctatatcatttgttggctacaagtgagcctgactgcaaggtttgcttctgctgagaaatcccatggtgagagtagaactcatgaagtgctgagtcacatttgcacctctggtgtggtggcagttcactctcccctggatgctgtcagctggccttgctttcatcctatccctgtaggcagggtaggtggctgggtaggagaagctattgagtgtatgacgcagaccaagctttcctgggccttctcaccaactagagaagcgctgatgtcgttcattgaggcacttaaacaccagtcactcagccaggcctcctcccagacattctgtaacatgtcagcactcacaaggtttaaagcaaatgtgttcccttgcagagaggaaggtgctctcagactgatagattagaggagacagacaaactcgtaatccttggggacttgaagagagtggctaggggaagggctgttaaaagaaaagggaccaataagaaaatccatctaaaggtagctcttgaggaggaaattaacttcttgaggggataaattagagggtaccaagtttatgttctggaatgtaccctggggagggcgctgcccactggattggtcccagtggactgaaaggtggtgctctcgagtcaggcgcttagtcccagagagagctgggtgccgcggggctcgtggtctgtgcctactcagggaaatgacttaggttctcccaggtgctctgttgataaggatggaagcagaactactttgagacacaagcaacaattggaagagtttttttatatgaactgaaatagatctaagagagcctggttaacagtttcctttaataccagttcagattaaatggttactttaggaacctgtgttactgtgtgagcacccacagaaacaagcaaacttatttcctacaaaaaatgaggggataataaccgatcagagtcacagtcgtttcaatataaacccttccgaaagcaaaagcagggaccacatgagcacacaagaagccaaagtttgtcagtgatcttaataaattaagactgagtaacatcctgcctttagaaaaaaataaccccgaggtggagaccagggcaggggaggtggcggagaagcatcgggccagatcaaccgttaataacatgcttctgagctatgtggatgtataaatgaaaacacccccaactaggtattgtagaggctggaaaaagatgtgatgggattatacaggtgatgcatatttttgttttgagactcaacaatgtgctacaaatgtgatacttaaccctgaactgcatgtattggggattgttttttaaaaagaaaaaaaacaactttgaatcaataaattaacagtttttcacttgctggctcttcttgctgtaaatggtgactaagaggttgggacagaaatcttgacaactagtggaaaacttggataatcttcaaggaccatggagccttctgtttccttctgtttgcagaaaagcaacactgcctgggttgtgatcctttacaagtgactacttcagacacaattggccacctctttgtatcactggatgactgatgtatgatttatgtgctgctgcccttagagggaagaaaaatgccatgttaaatcctgttttcttaaataaaaatgttgacaataaccagccttcccaagtgggagacaaaccattgctatgaggaccttaacttgtatttcctgtctctttgggggagaggggagggataaaccttgaattgcaaagatgtgtgttacaccttgatgtgaaaactttcctttggcagaagtggggctagagtggtgtcctgttgggagtgttccgtttttatgtacttgcttctgagtcgcgccactcagacacctgcctcttgggattgactgttttagtgcatgactttaaccttgtggcctggtgctctgcatttgtgaaacactctccctagccccattccttgcagcacatgctattatttggcaggtggtggtatctttaattaatgtgctttctttaattagtgtgctttcttctcactgagcctctgaagttgggtgcttggaatcagctgaagtgtttaaaggcaaatatagtcatttctttcttaacctcat

SEQ ID NO: 7351 - DNA, 390 bp, Homo Sapiens
  XM_927705
atgtacgaggcccgcaggatgtgggtgccccaactggaggcagcgggccccaggggctcctggctgccctgggcgcaccggtacctggtggaaaacaccttcttcgtcttcctggtgttggccctgctgctggctgtgatctacctcaacatccaggtggtgctggaccagaggaaggtcatctgcctgctcaaggagcagatcagcaacgagggggaagacaaaatcttcttaatcaacaagcttcactccatctacaagaagaaggagagggaggagaggagcagggttgggacaacccaggaggctgcggcaccccctgccctgctcagacgaacgggatgcctagggggccggcaatgggcctcgcaggcccgcccagcgccctga

SEQ ID NO: 7352 - DNA, 3856 bp, Homo Sapiens
  XM_927706
tgccacttcactccagcctgggtgacagagcaagactctgtctcaaaaaaaaaaaaaaaaaaaaagaagaaagaaagaaagaaagaaagaaagaaagaaagaaagaaagaaagaaagaaagaaatgaagactgccacaacttggaagcaaccaagatgtccttcaatgagtgactgcataagcaaactgtggtatattcctacagtggaatattattcagtgctaaaaggaaaaaactatcaagccacaaaaagatacagaaaaaacaaagacattttgctaagtgaaagaagccagtctgaaaagggtacatactgtgatttcaactatacgacattctagaaaaggccaaactataaagacagtaaaaagatcagtggttatctttgcagacgccgccatcgctgtgagccctgtactatcagccatggtcaactccgtcatcttttttgacatcaccgtcgacggcaagcccttgggccgcatctccatcaaacagtttgcagacaagattccaaagacagcagaaaactttcgtgctctgagcactggagagaaaggatttcgttataagggttcctgctttcacagaattattccagggtttatgtgtcagggtggtgacttcacacaccctaatggcaccggtgacaagtccatctatggggagaaatttgatgatgagaacctcatccgaaagcatacaggttctggcatcttgtccatggcaaatgctggacccaacacaaatggttcccagtttttcatctgcactgccaagactgagtggttggatggcaagcatgtggcctttggcaaggtgaaagaacgtgtgaatattgtggaagccatggagcactttgggtacaggaatagcaagaccagcaagaagatcaccattgctgactgtggacaattctaatgagtttgacttgtgttttattttcaccaccagacccattccttctgtagctcaggagagcacccctccaccacatttgcttgcaatatcctagaatctttgtgctcttgctgcagttccctttgggttccatgttttccttgttcccttccatgcctagctggattgcagagttaagtttatgattatgaaataaaaactaagtaacaacaacaacaacaaaaaagctcagtggttgccaggagtttggggatgggtagggagataaatagttctgaaacaggcgatttttaggggattgaaaatacgttggtaataatgtaatgatgggtacatgacattatgcgttttgcaaaactcctagacctgtaccacacaaagagtgaaccctaatgtaaactgggggtgggataaaggtgacagtatgtgagaactctgtactttctgctcgatctttccataaagctaaaactgctcaaaaaataaagtctattattttgttaaatgaaagaaattaacaatgaccatggcacgctcacacaaaaagattatcaaggacatttctctgtcaggaatgaatatttggtcatctcacaaggcaaaaccctgactagcagaggtgttagctgagggcacatggccatagatgccaatagtgacctgctggccacttgcagaaaggagagccttgacatccaaacacattgtttctcttgtattgtcctgtgcatacttatgtatcttaacaactttccttctttcctctccatttatccctctttttaaaacagggcttattgagggtgattaacttaatttttaaatgatatatggcagaatgtcaagagagtatagtgaagaacttcgtagaggaatggacataacccagaattcttagacttagagtacatgctgtgattgagaattttttattgtttcattgttcaagagattgtaggtacatgttcaattattagagaaatagttgcactctgttagaaggaagcttgggtctttcatgtttactttcaaaagggaaagtttatattgatattgagcaagtgaaagcatgaatatttattatttgatgtttgtttctgtgtttgaggaattcctcagcctctcagttttgacgaaaacaagaaaccacctcctgctttagaagctaaaatgccaaatgcttgctttctcagcctcctttgcagctagggtacaagcatatgacttaggttttgccaatctgtttgccagtgctgaatttcgacttcggaattaataaaaaaagaagcagattcagttatgctttctcttgtttctggtggaggccatgtagcagctgctacaatatctgttgcaaagcgaacaagtgggagtggtgctggtggctttgcagttagcctaggattgagcaattgctgcaattgttgctgtctgcatcttcggtgttacttcttactggtggtgacagtggtttcctccctggatgagttctacagcatggtttggggtacatttcctggctgcctagctttgatctggctctctagccttctcaacagttctacaagttccccactatttctgtgataaacctatttattgttaatgtcagccataattggcttctgtggtttatattttttaaaattccaagatataccaacgtaacagatagctcaacaaacatatgtctttttaaattaagatatattctgtgtcacatgaagtacaatggacaaaatgcaacaaattgaattgagctaaagaccaaatatatattaagcctggctggtcttaaaaatgtaactggatacagccaggcatggtggctcacgcctataatcccagcactttgggatcctgaggtgggcagatcacctgaagtcaggagtttgagaccaggctggccagcatggtgaaaccccatctctactaaaaatgcaaaaattagctgggtgtggtggtatgcccctgtaatcccagctactcgggaggttgaggcaggagaatcacttgaacctgggaggcagaggttgcagtgagccgagatcatgccaatgcactccagctttggcaacagagcgagactttgtttcaaagtaaaaaaataaaaataaaaaaataaaaacgtaactggatagacctaaggttcttgaataagcagaaaataatttaggtaaaaaccaaataataaactaacattctgaaaggtttaggatttggaggcccaaatgtcttagctaaaagtgttcattctaacctcacaggaaaattgaaatatgaaaatatacagaaaaatcttaggcagtatttatcaattttaagaaacaactatttacaggtttttcaataggcattacattaaaaatgaaatatatagttaataaatatgaaaactgtggatataatcaacacatttattttacttcttgaagtgttaacatgtgctgtctcaaatatcaacagtgtacacgtgagaaaaaacattttacatagattttctgcgacagaaaacagcatctcattagacatcccaagttttttcatttggaacacacacccattccccagtatattaggggtaataataatttaaagagtttaattactttttactactagaaaactaattttatgtttggcacaaatttctgaaatgctattccactgcaaagaataatacctatatatggccagaattactttttttctataacattaagataatacttgtcagcctgagcaacaaagtgagacctcatctttacaaaaaataaataaattagacgggtgttgtggtgatgagggtctgtagtcccagatactcaagaggctgaggtgggaggatcccttgagcctaggaggtcgcggttgcagtgaactatgattgcaccactgcactccagcctgggtaacagagcaagatcctgtctc

SEQ ID NO: 7353 - DNA, 1078 bp, Homo Sapiens
  XM_927730
atgggaagtcaagccagagcccagatgtgccccatcccttccccggctcccccggtgtccgccatggccaaagcctacgaccacctcttcaagttgctgctgatcggggactcgggggtgggcaagacttgtctgatcattcgctttgcagaggacaacttcaacaacacttacatctccaccatcggaattgatttcaagatccgcactgtggatatagaggggaagaagatcaaactacaagtctgggacacagctggccaagagcggttcaagacaataactactgcctactaccgtggagccatgggcattatcctagcatacgacatcacggatgagaaatctttcgagaatattcagaactggatgaaaagcatcatggagaatgcctcagctggggtggagcacctcttgctagggaacaaatgtgacatggaggccaagaggaaggtgcagaaggagcaggccgataagttggctcgagagcatggaatccgatttttcgaaactagtgctaaatccagtatgaatgtggatgaggcttttagttccctggcccgggacatcttgctcaagtcaggaggccggagatcaggaaacggcaacaagcctcccagtactgacctgaaaacttgtgacataaagaacaccaacaagtgctccctgagctgaggaccctttcttgcctccccaccccggaagctgaacctgagggagacaacagcagagggaaaaaaggagaaaagggaaaagcagaaaggaaaagaaggaaaagagaggaagggagaagggagaggaatgaattgaggaagtgaacgaaggcaaggaggtaggaagagagggaggaggaaaggaaggagagatgcctcaggcttcagaccttacctgggttttcagggcaaacataaatgtaaatacactgatttattctgttactagatcaggttttagggtcctgcaaagggctagctcggcactacactagggaatttgctcctgttctgtcacttgtcatggtctttcttggtattaaaggccaccatttgcacaaaaaataaataaataaataaaaaat

SEQ ID NO: 7354 - DNA, 1841 bp, Homo Sapiens
  XM_927735
atgtttgcactggaaacgtggcttcaccatggctggcgacaaagtcctctcttgcctgggccggggattccttttgtgtttctgtataacatcgatgacgagctgaagctgttgtcacttcactgccctctttggaatttcttcattgtgctgactgattctattaggggctaacaataaaggcagtctacccactactatcatgcttgggaaacaagcgtcagcttgtacatatgacaagagaggaccctgaatacaccctctcttcatcagcccaagccttactgaggtgggatgaagacctcattctctgttctttaaaacatgtttcgtgaactaatattggtccatgtattttttgtccttttgggactctaagtgggtcaagaagcaaaaacatccatgtgttgtttggggggaattggcaccattttttcctgactatgtttcaattaactaaagaataaatgatgaagaaattctccttgtagcacaactgtatgctgtgtaaattggtgtgagctcaaagcccagtcatgtgttttacctgtgggtgactctgttgtagaatggtcatattactgcatatgttatcatgacaacttgtgagtttgagtttatatttctcaaagaacaagttacccgtatatgcaacattgcgccattaaaagcttatttctctgtacacaaaatgggtaaaatcttgaaaaaacttagtaatttctcattcctaacacacagacagagtctcactctgtcacccaggctggagtgcagtggcgcaatctcggctcactgcaacctccacctcctgggttcaagcgattctgctgcctcagcctcccgagtagctgggactacaggtgcatgccaccacgcccagctaatttttgtatttttagtagagacggggtttcaccatgttggccaggatggtctcggtctcctgacctcgtgatctgcctgcctcggcctcccaaagtgctgggattacaggcgtgagccactgcgcccagccaacactagtcatttttattttttcactgaacattgatcaatactctaaaatgtttgtcatcctttagaataatgggaattaaagttgagcagttttccatctctaccaaatccttcaccacaagcagcattctattacagtatgaagaattgtctcatatgttaaaactgtacttttctctaacctttctctcactcctacaaggcccttttctcaaatcatatttctgagagaaatgtatggttctttctcacaggcctgctgatttgtaactgtgccatcgaatagagcaattagatccatcagacctttttcccctcattaggttcagtggaaccattctggttaaaacagcatgaactgaactcagtttacattcatattctatgggcaataccatttggtttttggaactgtttatctgctgttccctatcaagtattaatgtagggatgtcactcaggctgcgttgcactgggctgagttcaactgcgacgctctcactgacgcgtgcttacatgtgcttctcacttccggagcacaggcaggtggctgcggggtcccagctctgaatggatgcccatgatgcaactggggcagcccttgctttttgcttgctctcccacagaaacctttgtccttgcaactttatcctttgtcccgattgggtcccagatacacaaaatgtacaaatgtaaacttgctcattttattaaaattcttttagttctttgttctttctgtaattttttaaaataaaaattgccttgatggagtgatggttttcactcgcaccatacctagtctaaataaagagttctag

SEQ ID NO: 7355 - DNA, 282 bp, Homo Sapiens
  XM_927868
atgatgctttgggcactggttcacagagcccacagctccatggtaggagtcaatctgccacagaaggctggtgggtttttgatgaagaaggagctgaactactttgcaaaggccttggagagcccagagcgacccttcctggccatcctgggcggagctaaagttgcagacaagatccagctcatcaataatatgctggacaaagtcaatgagatgattattggtggtggaatggcttttaagttccttaaggtgctcaacaacatggaggtaggaacttaa

SEQ ID NO: 7356 - DNA, 333 bp, Homo Sapiens
  XM_927955
atggtgttgttggagagtgagcagttcctgacggagctgaccagacttttccagaagtgctggacatcgggcagcatctatatcaccttgaagaagtatggtggtggaaccaaacccgttccaaagaaaggttctgtggagggctttgagccctcagacaagtgtctgttaagagctatcgatgggaaaaagaaggtcagcactgtggtgagctccaaccaagtgaataagtttcagatggcttattcaaacctaccgagtgctaacatggatgggctgaagaaaagggacaaaaagaacaaaagtaagaagaccaaagcagcagcacagtaa

SEQ ID NO: 7357 - DNA, 3726 bp, Homo Sapiens
  XM_927968
atgcggaccctagaggcaaccagcgggctggatccgcacagcggccctggggaatggatcgtatccccgggagaggtcagcacggcccctcccgtgggtgtcacagagaccgataccggtcccgctccccgggaaggagtgggtctgggtccagtccgcaggaccccctcgcggatgctgacgcagaatggagttgaggtgggggcagcgctggaccctagggcccctgcctgcctcctggggagcccggtgacccaggcagccctgacgctcagcctgtgcaacccgaagctgcttctgcccagtcccagccgcggcccctttaagagggggtggtgcttcagcctggcgccagggacgctgccagcatgcaggccccgacggaagccgagactgcgcttcgtgcgaggcccgggcagcatcggcggcgtggtcagagcgagtctcggagaagatgtggtggcttccgtttgttggtggaggaggtggcaggcctcggcgggtaacccagagaacacagccgaagtggaatgtggggacgtctgcgacaccggggacagagcaactgtggatgaagagggctacatctggttcctggggaggagtcatgacactatcaatgcctctgggtggtgaaggcattgattgtcctgaccccacagtttctgtcccatgacaaggaccagctgactaaggagctgcagcagcatgtaaagtcagtgacagccccatgaaacctcctcgacactccgaagtccagatcgcaggccccacctggaatgctctccttgcagcctgttcgaagactcatgagaccgtgctgcacactggacttcaaccatgagcttcaccgtctgtctcttccttcactaccttcgctctgcactaggccataagctctgtaggagaaggaactcatcacagtgcctgccccagacaggttgttcataagcacgtattgaaatatagaattcccaggcacctccaacagagagactggaccttgtgagacccaacaagaagccagtatttcagaactgatgaaaaatagcaaggatctagattagggggtatagtgggaatgaaatgggggactgggtgatgccccatatttgtcaacgactcatagtctttctccagagatgtcttcctcccctgtgttctttgtctcatcagctgccaccagcactcactccagccactaaagccagaaagttgaaagacctctgccctcatccggcccagcccccatccagccaaagacctgtcatttcaacctcacgcccaccccgctttccactcccactgctcctgccttagttcagaccaccaccgtcgctctcctacccagttcaagccaagctgacctggccagtggccttcaggccttcccttctccatcctgccatgtccatcctccacaggcagaacaggaagctgtcatgtaaaagtgcaggtctgctttggtccttctcctaaacccttcagtggcttcccggttccctttgggtcctggtacagattccttagcatggccagggaggacagccctccatgatcctcccctccctgagatgttcctcctgccccagcaccctgtgtttgagcccaagcccgccctgtggtgtcacgggaggcccagctcctctgcctggggtgccttgcctggcctaggaactgggaaaacttacctgcttccaagactcagctctagcacctcttcctgctgggtgttttccgatgccccccctctcgccacctcatggggaccccacagtcccctgaagagccttctgccccagtgcctcaccccactctttagacctgtttctgtttccatggctgccttgccttcttagaccacgggctcctgcagagcgggaccccatatctcagtcggctttgcattcccagtgcctggccgaaactgaggctggaatggtctcctattccataagctctcaataacccttgaaaaatgactggaatcctggacagcgccaaggcagcaactgggatgggagagtgatctgctgccctctcctggcaatgtgaggaattgtcctaagcacagacaactccctccctgccttgcacaagtgcaggatgggggaaactggaaaaggagctgatggaggattggggaggtggatgctgtctaaggagacaaactgaattgaggggttgctgggactcggccggctcacatgctattcccatgtcatgggcccaggggccaagtcagtgcttccaaaggagggtgcatcctgagagaggctctggctcccccaacaaaaccctaaactcttgaaggacatcttccttctcagtataccctattgctgtgttgttgtaactatcactgtaacttttattcacttcagtgggcgatcactgagtttttcctccattgttgtaaaacatgtgttttgctcttgtgtgtaaaatgactgtgaatttagccactgccttctcctgattttaactcagctttctactgctaggaggttatctctgttctgggtttctcagctttctatcaaaacccaaatactgtcattcctcggtatccgtaggggattggttccaggaacctcccttgaagataccaacattgcaggtgcccaagcccctgatagagaacagcgcagcatttgcagacaacctatgtacacactgcatgcactttcaatcagctctagattacttctgatacctaattcaatgtaaatgctgtgtcagtagttgtctagggaataatgacaagaagaaaattttgtacatgttcagtacgtaggaaaaagaaagagagatcagactgtcactgtgtctatgtagaaagggaagacataagagattccattttgaaaaagacctgtactttaaacagttgctttgctgagatgttgttaatttgtagctttgccccagccactttgccttagccactttgacccaacctggagctcacaaaaatatgtgttgtataaaatcaaggtttaagggatctagggctgtgcaggatatgccttgttaacaaaatgtttacaagcagtatacttggtaaaggtcatcgccattctctagtctcaataaaacaggagcacagtgcactgcggaaagccgcagggacctctgcccttgaaagtggggtattgtccaaggtttctccccatgtgatagtctgaaatatggcctcgtgggatgagaaagacctgactgtgccccagcccgacacccataaagggtctgtgctgaggtggattagtaaaagaggaaagcctcttgcagttgagatagaggaaggccactgtctcctgcctgcccctgggaactgaatgtctcggtataaaacccgattgtacatttgttcaattctgagataggagaaaaaccgccctatggtgggaggcgagacatgtttgcagcaatgctgccttgttattctttactccgctgagatgtttgggtggagagaaacataaatctggcctacatgcacatccgggcatagtaccttcccttgaacttaatcatgacacagattcttttgctcacatgttttttgctgaccttctccttattatcaccctgctgtcctactacattcctttttgctgaaataatgaaaataatagtcaataaaaactgagggaactcaaaggccggtgccagtgcaggtccttggtgtgctgaatactggtcccctggacccactgttgtttc

SEQ ID NO: 7358 - DNA, 1249 bp, Homo Sapiens
  XM_927976
gcaaatgcatagcattggcactggtggtgtgaaagcacagcccaggatgcctcttcagtcacagtcacccactaaagctattcgatgagcacctagcatgggctaggtacctagaccaacacacagtttcaccaacatccctggctaaggtcacgtgatccacagagatgcttgtttgctgagcatgagtcagatctggagaaagtcctgagaaagtcccaaggcttctatgtctgaagttccaagccaggatggaagcagccaattcacctgctatagactaagtgtttgtgtcttcctcccctcaatttatatgctgaaaccctaaccctcatggtacttggaggtaggggctgggttagattaagtcatgagggtgagggtggggccctcatgatgggctgaatgccctcattaaagaaatggagaaacatgagatctctctctccaccatgcgaggatacagcaagaagacggctatctgccaaccaggaagacagccctcactagacacaggatctgccagcactttcatcttgggcttcccagcctccacaactgtaagaaataaatgtctgtggcttaagccactcagtcaatagtattttgatatagcagcttgggctgagatatcacctgtatcgattctttggcaatggattcagcaaatggtggctttgtagaatgatcagttaactgcagggatcagtcgtcagacggagctaaaaagtcccatgctcggggagcctcaccggagttccaggaaaatgttaagaagaagaataacaacttaagcttctacacgtcctaaccctgcaccaaatgctttaggtacggtgttattcatttaaatcccagaacatgcaacagcaggtttcatcagatatattttatccagggggtatataaggctcagagaataaaaaggatatccaaggtcaccaggttgcaaccaatacaggcaggtttcaacccaattcctctgactcaaagccctggctctgttctccacggctgtgccaaggaagactgtgccgaagatacctttttggtctcagattgttgaattttccttgactcctgggaaacagtttaaagcagccgcaaacatggtttccacaactgcattcctgaagcgcatacccagagttacttcttgtaacagcactttcttccagatgactgagatgcgtctgctggtgataagatcagattaacctatttcaacttgatagctagattctgacac

SEQ ID NO: 7359 - DNA, 635 bp, Homo Sapiens
  XM_928197
gaactacagaacatggccaagtccaagaaccacaccacacacaaccagtcccgaaaatggcacagaaatggtatcaagaaaccccgatcacaaagatacgaatctcttaagggggtggaccccaagttcctgaggaacatgcgctttgccaagaagcacaacaaaaagggcctaaagaagatgcaggccaacaatgccaaggccatgagtgcacgtgccgaggctatcaaggccctcgtaaagcccaaggaggttaagcccaagatcccaaagggagtcagctgcaagctcgatcgacatgcctacgttgcccaccccaagcttgggaagcgtgctcttgcccgtattgccaaggggctcaggctgtgccggccaaaggccaaggccaaggccaaggatcaaaccaaggcccaggctgcagctccagcttcagttccagctcaggctcccaaaggtacccaggcccctacaaaggcttcagagtagatatctctgccaacatgaggacagaaggactggtgcgaccccccacccccacccctgggctatcatctgcatggggctggggtcctcctgtgctatttgtacaaataaacctgaggcaggaaaaaaaaaaaaaagaaatacctaaaatc

SEQ ID NO: 7360 - DNA, 1707 bp, Homo Sapiens
  XM_928207
atggccggaggaggcctgaaaaagatcatctctgccacagagaagaagctggctcggatgctgctggccccagtggagacagggagacccggggagacaactgtattcattcaaggaggaatgggtggtggtgcaaacttaggtggaggccacagggtgcagaagacaggacacagcagagagagatacccaggatccttgaggtgcccagtctgcttgtctatggaaggctgtctggaggggacaacagaagagatctgccccaaggggaccacacactgttatgatggcctcctcaggctcaggggaggaggcatcttctccaatctgagagtccagggatgcatgccccagccagtttgcaacctgctcaatgggacacaggaaattgggcccgtgggtatgactgagaactgcgatatgaaagattttctgcagctcaagccagtaggattacttgaggaacacaatgtgggagagaaagagcgtggtcaaggacaacaccaatgtgttcagctagactggcagaaacgagccgccacgggtgtaaatgttctgacctgtcatcgggggaccaccttgaagaagcaggaaaacttgagtaaagaacccactgattgggccacatctaataccgagacgtgcgaggtggggcaggtgtgtcaggagatgctgctgctcatagatgtaggtacgtggactgaggtagaagacgaacacctgtcccaagtccctggcagctccctccaccccactggattctttcccctgaatttcctgctcagctcccttcacatctgcaattttcaatccgactcttcttctctctgcatcttgggttccccttatgaaaactggggctgcagcgctgttggggctcaaaattcccagaagaccaccatccactcagcccctcctggggtgcttgtggcctcctatacccacttctgctcctcggacctgtgcaatagtgccagcagcagcagcgttctgctgaactccctccctcctcaagctgcccctgtcccaggagaccggcagtgtcctacctgtgtgcagccccttggaacctgttcaagtggctccccccgaatgacctgccccaggggcgccactcattgttatgatgggtacattcatctctcaggaggtgggctgaccaccagaatgagcattcagggctgtgtggcccaaccttccagctccttgttgaaccacaccagacaaattgggatcttctctgtgtgtgagaagggtgatgagccgcctcctgcctctcagcatgagggagtggaagcaaccctgcatgggttccagagccacaggaaaggcgctgttcacagaagcactgagcagggtccagggaaggccaactggaacccccagtgtgtgcgtatccgtgaccacctgaagtgggcactaaggcagccgccgtccacttctgctgggcgccagctcaccaggaaagccatatcatttggcttgtttacacctttggctagtgtgaataatgctgctatgaacaaagacatgcagatacctgctggggcccctgctctcagttcttttcagaatacaccagaagtagaattgctgcatcgtgtgtgtatcttggaagtctttccaagtgggtcgacagaaggatacttcaataaaaatgggcaacaccgctggacagccatcagagccatgaagtccctggcttag

SEQ ID NO: 7361 - DNA, 1342 bp, Homo Sapiens
  XM_928224
atggcagccgagagccgggggttgagccggaagaaggaggaggcccttcaggccctgtcacaggaacggagccggctgctcgagctcaattgccttcagggaacacctggcggggacttctctgagcccaacccggccctcactaagctgctgttcacccagaagacagaccgccagctgctggtgctccaggatgccgtggcccactccgctgccacccctacttcttcctgcctcttttctgtccacagctccctgcagggctccattggcctccagaggactgggagcctgccccggaaaaggggggagagggggagccagagaggatccccccgacctctgtccttccattgtactgaatccctggaggcctcagctctcccgccagcagtgggggactccggcagataccccctctaccagctgctgaactgtggccgtgggaatagctgtggggccatccatccagacattgcccacatggagcggctcctgcagcaggccatggcggagagggagcggctgctcaaggcccgggaaggaacaagaaggggcacggaaggttcctcaggccctgctgttcctgccatcacggccccacccaccccaccccaccctccaggcccgcgaatcttggatctccggcagcatctggagggatggggccacaacccggaaaactgcccacatgtgcaggtgtctgggtgctgctgccgtggacccctggtgaagatgggcggccgcatcaagacctggaggaagcgatggttctgctttgaccgccaagcccgccgcttggcctactatgcggacaaggaagagaccaagctcaaaggtgtcatctacttccaggccattgaggaagtctattatgaccacttacgctgtgccttcaagagccccaacccccgcctgaccttctgcgtcaaaacctacgaacgccttttctacatggtggctccgagccccgaagccatgcgcatttggatggacgtcatcgtgaccgccgctgacgaaaaccacgccccctgagtggccccgccctcttggggggaagtcccttcgaggctccgccggcgcggggcgcgggggcgttcctaggccccgcccactgccggaaaacttggacgcaccgctttggaactctcccgggaattccgcaggcgcggcagttcagctggcctgagctgctgcgttctgggttgcaggtgccttgcccccgacgggatcgccggcccctaaggccctgcccggggcaggaggaagattgcaggggcgggaagaaactatttattggtgctcctgtgataccgaattaaatacggaggaaaaacaggaa

SEQ ID NO: 7362 - DNA, 1214 bp, Homo Sapiens
  XM_928241
aaacctgatgagaccaacaaattgctcagggagctccagctcaatgagcatttgaacacctgaccccttcccaatatgatgtctcttggatccctcatacaaagaaatgcatcttgctgaacaggtgaccaataatcttaaagaacttgtacaacaagtaactccaggtgatatcgtaagcatgtatggagttcaaaaagcaatggggatttccattccttcccctgtcatggaaaacaactttgtagatttaacagaagatcttgaagaacctaaaaagacacggagtggacctagtgggagttgaggccacctggtatttgattatgtattatgtacatacttttccattcttaacttaaaaacgctttcacaagatatcaaatatttgtaaattgtgcttttaattaaacttcggaacagtgaaaacaaacaaaaaacaccttcctggaactaattatagcaaggttacaggatacaaggttaacacacaaaagtcaatcatttttcagtatgtcaacaatgaacaagtggaatataaaaattaaaaaattcactaccatctatataagcaatcaaaaaataagataggtataaatctaacaacatatgttcaagatctatatgaagacaactataaaactcttctaaaaatgttctaagaagaactaaataaatgaatagatattccatgttcatggataggaagactcaatattgtgaacatgttggttctttccaatttgatctatagattcaacacaatcccaaccaaaatcctagcttattacttagtagattcaatgaactgattctaagtttatatgaagaggcaaaagacccagaatatccatcacaatactaaaggaaaagaacaaagttggagtactgacactacccaacttcaagacttataataaggctacagtaatcaaaacaatgtggtattagtgataaaatataaaattaatcaatacaacaaaatagagagtccagaaataggacacataaatatagtcaactgatctttaacaaaggagcaaatgcaatacaggggaaaaaacagccctttcaacaaatggtgctgaacaattggacatccacatgcaaagaaaaaaaaaagaaactagacacagaccttatattttttacaaaaattaattcaaaatggatcacagacctaaaacacaaaactataaaactccaaaaaaaaa

SEQ ID NO: 7363 - DNA, 1766 bp, Homo Sapiens
  XM_928247
atggcccattacacagccctcaggaggggcggagcgcgtgcgaaggcgacgcccccagcccctaggcctcgcccaggcggcttccgcccgcctcttcaacgcgcacgctgctaccgagctgcaggaggccgcgggcgcgagactgggaatgcgcagggcccccgcctggctctacaagcccgggccgcggcccccgccttccccgccgcctcccggcgctccgtgcccgccccacgaggccggcggctgctgctacctggggccgttgctgcttgtgccgtgagcgacggccagccattgtccccgccgctccgtcagccgcgcccggccgcgcgcgcaccggaaggcgcattggcgtcttgcgggctccgggccgggtgggcaggatggcctccacaagccgcatggcgcgcatggggagcctccgttgatgccgccgcgccgccctccgaggctgcatccgcggaagcccggctccccgagcgctccggcccggcccggcgccccggacctgagtgcgtccccatgaaggcgcccgggctggcccaggcggccgtggcagaggagaccccggactgggcgcccgagctctgccccagccccgagtcgcggtcgccggagccgcctgccaaccgccttcaagacttcgacacgctggtcaccgtgggaaagcaactagaagccatttgtgtcaaggtaacgtctggagaaacaaaaggtcaggaacggccaacgtccctactggccacagtctagccccaatctgcaagacagagccagccgccccgggggaattcccgcctggtgggactccacgtcaccagcccccagctgctcagggtacagcccctcgtgagaaccgagccacagtcatgtttcctacatcagcctcctgctcaggggtttgtacagagaccactgccagccctctaggtggtccctgcaaagaaagtcccagctcccaaggctccaaatggacagggcaccatgttgaccccttcgttggcctccagttcgccgactgtaacatgtttcatccagttcaggacgtttatttatttccaacttgcatacaaaacatactgagaaactaaaaccatcgttaaaagtgaagacacgttgagacaggtatctcgacctgccaagtatacagctaaagctgagttcataaaaagggatgatttggccgacggtcatctgccagattctgatgatgattcagaagtcagtgtggaagaagatcagagggagaggcaggcgctctttgacttatcaagctgctccctgaggcccaaaagcttcaagtgtcagacttgtaaaaagtcatatatagggaagtggggactggcccagcattttaaacttaatccaggccatggccagctggaccctgagatggtgctatctgagaaagccaatgggagcaccctccgggggtgcacagaggaaaggacgctcagcctgaccttcccgaggctgtccgtgccagcggctccgcgtgagggaggggcccgctcctgcttggtgagagagtcagcacgcggtggcctgcagtctcactctgtcgcccaggctggagtacagtggagcagtctgagttcactacaacctccacctcccaggttcaagtgattctcctgcctcaacctcccgactactcaggaggctgaggcaggaaaatcgcttgaacccaggaagtggaggttgcagtgagccaagatcataccactgcactccagcctgggcgacagagggagactccgtct

SEQ ID NO: 7364 - DNA, 4787 bp, Homo Sapiens
  XM_928299
aatggccatcttctctcggtatcctcacatggtagggagaaaagcagctctagtgtctcttataaaggaagtaatgccaccataggggctctattctcatgacctcatctaaacctaattctctcctaaaggccacgcctcccagtatcctcaccttgggggttagggctttatcatatgaatttttttttttttttttttttttttgagacagagtctcgctctgtctgtcacccaggctggagtgcagtggcacaatctcggctctctacaagctccgcctcctgggttcacgccattctcctgcgtcagcctcctcagtagctgggactaaggcgcccgccactgcgcccggctaattttttgtattttcagtagagacggggttttaccatgttagccaggatgatctcgatctcctgacctcatgatccacccgcctcggcctcccaaagtgctgggattacaggcatgagccaccgcgccgggcctatcatatgaattttgagggaacacaaacatgcagtctgtagcagatggtaataggctgacatattacacttgttgatgtaaatctgataggtttctttctctccaaggacagctttttaaatatttaacagtatcaataatttttcaggttctgtgagaattttataatttataatttgcagacttaatgtataatctattttgtcctaacaattacaaatatattttttatttcagattgtatatattcctaccagatggagataattacagctttaaaaatttttattttttcattttatttcacacattgacattaaatttttatggacacataataactgtacatatatatggggtagaatgtgatgttttaatacatgtactcaatgtgtaatgatcaaatcagggtaatttgcataatgatttttctgtagggagaaaattcaaaatctactcttctggctattttcaaatatataatatgttattgttaactatactcatcctactatgcaataggacaccagaacttattcctgggttctacatccgttaaggcaaccaaggattggaaatattggaaaaaaaaattgcgtctgtactgaacatgtacagacttttttcttgtccttattccttacacaatatagtacaataactatttgcatgacatttacatcggatattatgagtgatctagagttgatatgaagtatatgggaggatgtgcaaaggtgatgtgcaaatactatgtcattttatatcagggacttgagtatcctttgttaccctcaggagatcctgaaaccagtcccccatggatactgagggctgactgtatagtcctatcctcacggaactttcattctaatgggggaagactgactataaacaaaatatatgtaataggtggtggtaagtaccgtggagaagtaacaaacggggcaaagtgagttatacagctccattcttagaaaccttggagtacttttcttagtttatacttgtggtggtttccttttgtctcctttattacatgggactctgacatgtgcccatagctagggtgacagtaggatctacccgatagtagggtggcagtaggatctacccaaaaagcgtcctgctgatacaggaccaaagcatcctgttgttctcgagcctataaaaagagctaatggtcttgcttctcttaactgtggcctcctacactgtgttttggatgattggtgatgtcttggatattctgtttctttggaactttgaatatacaacactttactagggaattagcaatggaagcagagcaaagatgtacagaggaaacaatgcgtaactctgatggaattgaagtcatgaggcagcagagagcttaaattacagctttaaaaatttttattttttagagggaatttacttgggagtaacagcagtaatagttaacggagccagaatgcttgagtcatataattgcaaagcagagttgggagcaacagatgctaaagagtagttgctgtagttcctctttgggtcgtaggagcagttgtcatattcctatatagctactgcatgaagaagagttcttagtgaggcctgggtgaacagctcttcttagtattctgtgtgaccccatttgaccttttaacaaatccctaagtaaataaatagcccctcaggtaaactaagtttttctctgctgtttttttgcttgagagagctataactgtaatagacttatatttctgaacatttcagtgcttgccaatatttggtaatatttatgtttcctatatttgtaatgaacattcttcttccggtacattttttgttaaattattgtttgatggataaaagttcaccctttattgtataaaattgactgagattaatttatacacattgacaatgggtaaatagaatttttcagattattaaaagctgaaggatgcccacgtaagcaaaaaaaaaaaagaaaaaaccaacaaaaataaacccaaacccctcaaacaatttcgaacacgaaacattcttctgatgccggcatccctgcttgcaggtgtgaagggggcaggaatcagcgaggtgtcctgggctgagtccccggagtgggaagaggtggcaggaaggggatctgaggaggagaacaggggtcctggtggtctgtgcttcttcccagacacgggagctgtagaggagacctctgcagcagatgctaggggggccagtaggcccaggcagtcttgggacttgggtctgtcctgctgtgcatccatagtgggtgctttagaaacgggaggcccacccgaagtccctgttgcaagtgaggacaaagtgtgggaaggccgtgagggtctgcagtccgggatggccttgtcctcaacgtgcagtgcactgttgatgcgctggaatgccgtctctttttccaggtgcaggtcttcagccgtgacccggtaccccagctctaagggaggtggcagcatcaaaggctcccctcgcctgcgtggcagcaggggaatcttgcgtctacggggcctagagtcctgggatctgggggagccacccgttggggcgattgtctgccctggtgctgtatctgcccccttttcacaccgtgtgtgacccgaagagacagcctgaggcctgtcctcactcactgtctttgagtaactgagggtcagctggcagcgggatgaggctggccccctcctctgctttagccccggcaagcctcccgtggagctgtaggagctggagatggcatttcgtttggtgctcgagctcgtccaggatgtctgggatgtgtggttatatctgatttctgagctctgggcgtggaggtctgtctgcagaggcccgggcctgggcacaaagggagaggggcctccattgtcccgcaggggccaaaatgcagaccgtgcatccccggtgacctcggggaccgttctctgatcatcaggattttcttggactctggggtccttgtcctgctcaggcatccctgccccgctctccttgagggccctcaacactatcttccctggacacaagtctggggacagccgggtgttgtggaccccaaaggggtgactacctgctcctgggccccacagagtccttgtgctcagtgtagtggctgagctgggggatgccctggaactcggagcacacagcactggcttactgtggtacctgtgcagtgaaattgaagacagaatcaccaggatggaacacaggtcttgcaggatcacggaaaaccttcttagagttgtcttgacaccactgatgtcgagtgtgcgggtgtttgtaggatggcctgccactcagtccaggggcaggagcaacggggagatcccacaagcaaagtgaactgggggatgggctgaaggggctccaggcaactgagccctactcgcaggtcctcggccttggcccaaacaggaatgaggggcacagagtgcccgggtaaccgctcctgggagcagtggggaactgtcggatacttgaactctcaagagctgggctctgagcgtcctcgtccagctgccaacttggccaaaggctaagccagcagattgttctgttgccgggcaacgcgacttctaaacctgagggagtgggcatgtgagcacataatggcaccagtgacagagcgaccataatggatgaataagcgcagccaggtaccggcgcaaggcacctgctggcaatggcaggaggcggacgtggggggtcgtgcagtaggtactggagggagagacgtgggcacaaaggtcgcgggaggaacaggtgcccacaatggctgcatatttgcccgtggatcactgaagattcctgctctcctgctgaggtggagactgcagtgagctgagatcgcaccattgcactccagcctgggcaacgagtgcaaaactcagtctccagataaaaaaaagaaaaagaaaaaaaagaggccgggtgtggtggcttatgcctatgatcctagcactttgggaggtcggggtggacggatcacgagatcaggagttggaggccagcctggccaacatagtgaaagcccgtctctagtaaaaatacaaaatttagtcagacatggtgggcaggagagagcatgtgcaggggaacatccatttataaaaccatcagacctcatgagacttattcactaccatgagaacagcatgggggaaactgcctccatgattcagttatctccacctggccccacccttgacacatgggaattgttacaattcaagatgagatttgggtgcggacagagccaaaccatataa

SEQ ID NO: 7365 - DNA, 3854 bp, Homo Sapiens
  XM_928338
tgccacttcactccagcctgggtgacagagcaagactctgtctcaaaaaaaaaaaaaaaaaaagaagaaagaaagaaagaaagaaagaaagaaagaaagaaagaaagaaagaaattaatgaagactgccacaacttggaagcaaccaaggtatccttcaataggtgactgcataagcaaactgtggtatattcctacagtggaatattattcagtgctaaaaggaaaaaactatcaagccacaaaaagatacagaaaaaacaaagacattttgctaagtgaaagaagccagtctgaaaagggtacatactgtgatttcaactatacgacattctggaaaaggacaaactataaagacagtaaaaagatcagtggttatctttgcagacgccaccatcactgtgagccctgtactatcagccatggtcaactccgtcgtcttttttgacatcaccgtcgacggcaagcccttgggccgcatctccatcaaactgtttgcagacaagattctaaagacagcggaaaactttcgtgctctgagcactggagagaaaggatttcgttataagggttcctgctttcacagaattattccagggtttatgtgtcagggtggtgacttcacacgccataatggcactggtgacaagtccatctatggggagaaatttgatgatgagaacctcatccgaaagcatacaggttctggcatcttgtccatggcaaatgctggacccaacacaaatggttcccagtttttcatctgtgctgccaagactgagtggttggatggcaagcatgtggcctttggcaaggtgaaagaacgtgtgaatattgtggaagccatggagcactttgggtacaggaatagcaagaccagcaagaagatcaccattgctgactgtggacaattctaatgagtttgacttgtgttttattttcaccaccagacccattccttctgtagctcaggagagcacccctccaccacatttgcttgcaatatcctagaatcttggtgctcttgctgcagttccctttgggttccatgttttccttgttcccttccatgcctagctggattgcagagttgagttaagtttatgattatgaaataaaaactaagtaacaacaacaacaacaaaaaagctcagtggttgccaggagtttggggatgggtagggagataaatagttctgaaacaggcgatttttaggggattgaaaatacattggtaataatgtaatgatgggtacatgacattatgcgttttgcaaaactcctagacctgtaccacacaaagagtgaaccctaatgtaaactgggggtgggataaaggtgacagtatgtgagaactctgtactttctgctcgatctttccataaagctaaaactgctcaaaaaataaagtctattattttgttaaatgaaagaaattaacaatgaccatggcacgctcacacaaaaagattatcaaggacatttctctgtcaggaatgaatatttggtcatctcacaaggcaaaaccctgactagcagaggtgttagctgagggcacatggccatagatgccaatagtgacctgctggccacttgcagaaaggagagccttgacatccaaacacattgtttctcttgtattgtcctgtgcatacttatgtatcttaacaactttccttctttcctctccatttatccctctttttaaaacagggcttattgagggtgattaacttaatttttaaatgatatatggcagaatgtcaagagagtatagtgaagaacttcgtagaggaatggacataacccagaattcttagacttagagtacatgctgtgattgagaattttttattgtttcattgttcaagagattgtaggtacatgttcaattattagagaaatagttgcactctgttagaaggaagcttgggtctttcgtgtttactttcaaaagggaaagtttatattgatattgagcaagttaaagcatgaaaatttattatttgatgtttgttgctgtgtttgaggaattcctcagcctctcagttttgacgaaaacaagaaaccacctcctgctttagaagctaaaatgccaaatgcttgctttctcagcctcctttgcagctagggtacaagcatatgacttaggttttgcccatctgtttgccagtgctgaatttccacttcggaattaataaaaaaagaagcagattcagttatgctttctcttgtttctggtggaggccatgtagcagctgctacaatatctgttgcaaagcgaacaagtgggagtggtgctggtggctttgcagttagcctaggattgagcaattgctgcaattgttgctgcctgcatcttcggtgttatttcttactggtggtgacagtggtttcctccctggatgagttctacagcatggtttggggtacatttcctggctgcctagctttgatctggctttctagccttctcaacagttctacaagttccccactatttctgtgataaacctatttattgttaatgtcagccataattggcttctgtggtttatattttttaaaattccaagatataccaacgtaacagatagctcaacaaacatatgtctttttaaattaagatatattctgtgtcacatgaagtacaatggacaaaatgcaacaaattgaattgagcaaaagaccaaatatatattaagcctggctggtcttaaaaatgtaactggatacagccaggcatggtggctcatgcctataatcccagcactttgggatcctgaggtgggcagatcacctgaagtcaggagtttgagaccagcctggccagcatggtgaaaccccatctctactaaaaatgcaaaaattagctgggtgtggtggtatgcccctgtaatcccagctactcgggaggttgaggcaggagaatcacttgaacctgggaggcagaggttgcagtgagcccagatcatgccaatgcactccagctttggcaacagagcgagactttgtttcaaaataaaaaaataaaaataaaaaaataaaaatgtaactggatagacctaaggttcttgaataagcagaaaataatttaggtaaaaaccaaataataaactaacattctgaaaggtttaggatttggaggcacaaatgtcttagctaaagtgttcattctaacctcacaggaaaattgaaatatgaaaatatacagaaaaatcttaggcagtatttgtcaattttaagaaacaactatttacaggtttttcaataggcattacattaaaaacgaaatatgtagttaataaatatgaaaactgtggatataatcaacacatttattttacttcttgaagtgttaacatgtgctgtctcaaatatcaacagtgtacacgtgagaaaaaacattttacatagattttctgcgacagaaaacagcatctcattagacatcccaagttttttcatttggaacacacacccattccccagtatactaggggtattaataatttaaagagtttaattactttttactactagaaaactaattttatgtttggcacaaatttctgaaatgatattctactgcaaagaataatacctatatatggccagaattactttttttctataacattaagataatacttgtcagcctgagcaacaaagtgagacctcatctttacaaaaaataaataaattagatgggtgttttggtgatgaggttctgtagtcccagatactcaagaggctgaggtgggaggatcccttgagcctaggaggtcgcggttgcagtgaactatgattgcaccactgcactccagcctgggtaacagagcaagatcctgtctc

SEQ ID NO: 7366 - DNA, 529 bp, Homo Sapiens
  XM_928349
tgggacagaggactgctgtctgccctctctggtcaccctgcctagctagaggatctgagactactcaccccataacctcaaaaacctcttcatgaggatggtgaccccagccatgaggaccctcgccatccttgctgccattctcctggtggccctgcaggcccaggctgagccactccaggcaagagctgatgaggttgctgcagccccggagcagattgcagcggacatcccagaagtggttgtttcccttgcatgggacgaaagcttggctccaaagcatccaggctcaaggaaaaacatggcctgctattgcagaataccagcgtgcattgcaggagaacgtcgctatggaacctgcatctaccagggaagactctgggcattctgctgctgagcttgcagaaaaagaaaaatgagctcaaaatttgctttgagagctacagggaattgctattactcctgtaccttctgctcaatttcctttcctcatcccaaataaatgccttgttacaagatttctgtgttt

SEQ ID NO: 7367 - DNA, 962 bp, Homo Sapiens
  XM_928387
cgcgcaatgcgagggagacgagattatgtaaatgagtggattctggctgagctatcctattggctatcgggacaaaatttgcttgagccaatcaaagtgctccgtggacaatcgccgttctgtctataaaaaggtgaagcagcggcgttttcggcgactttcccgatcgccaggcaggagtttctctcggtgactactatcgctgtcatgtctggtcgtggcaagcaaggaggcaaggcccgcgccaaggccaagtcgcgctcgtcccgcgctggccttcagttcccggtagggcgagtgcatcgcttgctgcgcaaaggcaactacgcggagcgagtgggggccggcgcgcccgtctacatggctgcggtcctcgagtatctgaccgccgagatcctggagctggcgggcaacgcggctcgggacaacaagaagacgcgcatcatccctcgtcacctccagctggccatccgcaacgacgaggaactgaacaagctgctgggcaaagtcaccatcgcccagggcggcgtcttgcctaacatccaggccgtactgctccctaagaagacggagagtcaccacaaggcaaagggcaagtgaggctgacgtccggcccaagtgggcccagcccggcccgcgtctcgaaggggcacctgtgaactcaaaaggctcttttcagagccacccacgttttcaaataaaagagttgttaatgctggccactctcagtccagcgttcctcagtagtgaatagcgaacctggagctgacgggacgggacgggacgggacgggacggggcggggcggggcggggtgtgtgtgtgtgcgcgccgtcttccatctggagcacgtaactgccttggctcttcgatgagtgggtccccagtcctaggacttcccagggcaggtgcaggcaccaaacgtcctgggcgccgccacggtccgctccacacagtcacaaa

SEQ ID NO: 7368 - DNA, 279 bp, Homo Sapiens
  XM_928427
atggacaggactgtcattcagaaataccacactgtgaatggccacagctgtgaagttaggaaagccctgtcaaagcaagagatggttagtgcttcatccagccaaagaggtcgaagtggttctggaaactttgctggtggtcttagaagtggtttcagtgggaataacaactttggtcgtggaggaaacttccgtggtcgtggggcctttggtggcagccgtggtggtggtggatatgatggcagtggggatggctataatggatatggtaacgattga

SEQ ID NO: 7369 - DNA, 1592 bp, Homo Sapiens
  XM_928429
tgcccgtggacgccgccgaagaagcatcgttaaagtctctcttcaccctgccgtcatgtctaagtcagagtctcctaaagagcccgaacagctgaggaagctcttcattggagggttgagctttgaaacaactgatgagagcctgaggagccattttgagcaatggggaacgctcacggactgtgtgattctcaaagaccaggtgcccacttaactgtgaaaaagatatttgttggtggcattaaagaagacactgaagaacatcacctaagagattattttgaacagtatggaaaaattgaagtgattgaaatcatgactgaccgaggcagtggcaagaaaaggggctttgcctttgtaacctttgacgaccatgactccgtggataagattgtcattcagaaataccatactgtgaatggccacaactgtgaagttagaaaagccctgtcaaagcaagagatggctagtgcttcatccagccaaagaggtcgaagtggttctggaaactttggtggtggtcgtggaggtggtttcggtgggaatgacaacttcggtcatggaggaaacttcagtggtcgtggtggctttggtggcagccgtgctggtggtagatatggtggcagtggggatggctctaatggatttggtaatgatggaagcaattttggaggtggtggaagctacaatgattttggcaattacaacaatcagtcttcaaattttggacccatgaagggaggaaattttggaggcagaaactctggcccctatggcggtggaggccagtactttgcaaaaccacgaaaccaaggtggctatggcggttccagcagcagcagtagctgtgtcagtggcagaagattttaattaggaaacaaagcttagcaggagaggagagccagagaagtgacagggaagccacaggttacaacagatttgtgaactcagccaagcacagtggtggcagggcctagctgctacaaagaagacatgttttagacaaatactcatgtgtatgggcaaaaaactcgaggactgtgtttgtgactaattgtataacaggttattttagtttctgttctgtggaaagtgtaaagcattccaacaaagcgttttaatgtagattttttttttttgcacccatgctgttgattgctaaatgtaatagtctgatcgtgacgctgaataaatgtctttttttttttaatgtgctgtgtaaagttagtctactctgaagccatcttggtaaatttccccaacagtgtgaagttagaattccttcagggtgatgccaggttctatttggaatttatatacaacctgcttgggtggagaagccattgtcttcggaaaccttggtgtagttgaactgatagttactgttgtgacctgaagttcaccattaaaagggattacccaaacaaagtcatggaatggttataaaagtgattgttggcacatcctatgcaatatatctaaattgaataatggtaccagataaaattatagatgggaatgaagcttgtgtatcatccattatcatgtgtaatcaataaacaatttaattctcttgaatgaaaaaaaaaaga

SEQ ID NO: 7370 - DNA, 1233 bp, Homo Sapiens
  XM_928441
atgaatgggattcagagcctgaactcaaggtcaacgtcttctgaatcacaaagagctggtgggtcagtctgggagaagaaagaaaattctgcgccaaatgggaaaacccttaaagtctgcatagttttgcttgtcggtaagaacacaggtaggcggcgggaagagaggtggcaagcagccccaacgctcgccgagatccccagggttttacaaacggatcgtcctgaagtctccaaaactccaagaccctccaggagtccgaaagtcacagagcgctctgcgcccctgccacctgcccagcctcccgctggggtccggcagtccccactggagaccccgacatcgcggggctccgcggcccccgcgccgacccagggccgccagggggcgggcgggagcagctctccgggtgcctcccccgccggttcccctcccccggcccgccggccactcacggattttcactcggcggtggtccaggcgcgcagcggcggcttgcagggcgtcgaggcggcggtgcagcgcggcggtgcggtggcccagcgcggccgcctggccctcgagctcgccgaagatgtccccggcgcagcgcgacagggtctcctatggacagaagtgcgggcaaggagctttgttcctccccgatgtcaccctcccacagcccacttgctagcaggcaagagaggggtggaggccggcagtaaggcatgtactgaactggacctctggtggaatgggtcacccacgctgggcttgattccacatatggtatctgagactcacacagtgtggttggaagatagcacagtgacctcccaggcacagccctctgccagccctccactggctgccctaggatgctggccttcctccgatgggagtcgggcccagtctgctgtgagccaggagaagccagcaagctccctgcgaggcctggaggagcccttctcactcagcttggtgttcgatgccagtgcccccgcccattgtggggtgagggtgggactctcagcacagccctgtccaaataaatcctctaaagccctcttccatctgcagtcacttgagtcttttaaagcaacagagacaactcgcaacatcaacaatgcatttggcccaggaactgcaaacgaacattcagtgcagtcatggttcaagacattttgcaaaggagatgagagccttgaagatgaggagcatagtggccggccatcagaagttgacattgactaa

SEQ ID NO: 7371 - DNA, 504 bp, Homo Sapiens
  XM_928473
atggaagtgattgaaatcatgactgaccatggcagtggcaagaaaagggactttgcctttgtaacctttgatgaccatgactccgtggataagactgtcattcagaaataccatattgtgaatggccacaactgtgaagttaggaaagccctgtcaaagcaagagatggctagtgcttcatccagccaaagaggtcgaacaggttctggaaattttggtggtggttgtagaggtggttttggtgggaatgacaactttggtcatggaggagactttagtggtcatagtggctttggtggcagccagggtggtggtggatatgatggcagtggggatggctataatggatttggtaatgatggaagcaattttggaagtggtggaagctacagtgattttggcaattacagcaatcagtcttcagattttggacccaagaagggagaaaactttggaggcagaagctctggcccctatggtggtggaggccaatactttgcctaa

SEQ ID NO: 7372 - DNA, 273 bp, Homo Sapiens
  XM_928514
atggtgtcagacatccggaaagaagacgggatgaatgttttacctctgaagtacatcccaaatgtgggagttaacttcagctttgctggggtctatttggccagtgaaacgctgcctggttccttcgcacatccggaagccacttcacggggggccgtcgcaactggaaccacacacttggcatcggcggttgagccaaatggggactcgtggtgcaagcaacgctccccacgtgttagcgtgcgtgagattcggttggcggaattttactag

SEQ ID NO: 7373 - DNA, 1444 bp, Homo Sapiens
  XM_928616
atgcggattaaatatccactatccgtgtttttccgagtcttacagcagaaaggtctgcctgcattttttggctttgggctcttctccactgtcaccattagcaaccttgcatcccatggacctgtcttctatggccacatgtctctgtggctctttccttcccccttctcttccactgttaaggactcatgtgcttacttagtcctgaatggagacaccgtcatcatccacatagcccactgtcgtaatccatacaggctgctacaaggaaatgcattagaccaggtagcttataaacaatagaactttgtttctcacagtcctggaggctgagaagtgcaagatcaaggtgccggcagtcttggtgtctggtgaaggcctgctttctcatagaggcttccttcttgctgtgtcttcacatggggagaggaacaaacaagctcccttgtgcctttaataaggtgctaatcccagtcatgagggcagagtctcatgtaaggcttaacctcctaatacatcaccttgagggttaggattttaacacatgaacattgacggaacacaacgttcattccatagcaccagggtagtctcctcatgtgaaggtctttacctgagtcacatgcatgatgtaccattttcatgtaaggttctaggaatctgtggacatctttggggggggccgttattttgctgatcacatattacatatattttaatattctagactagtatgaaaacaatgccacttccattgctttatatatgtatatatatatatacacattgtctaatgctataattaaaaaaaagttgtagacacaaatatacccatttaaaaaaaaacccattttttgctattttactttatactgccaactcctttttcctgaaactgcttcaactctggaattcttttttgctgttagttttattttattgaaatattcatgaacgagcatacacttgtatatggatttaaaattcacagtaaagttctcatgaattcatctgtgaataacattttatagacaaaatgtctgcactaggacaagagaaagatgtataattcccttgttctaaggtaccgccattcattgttattattttaaaatacgagtgttgactgatgttaaaacacaaaatggggccgggagtggtggctcccgcctgtaatcccaacactttgggagatcgaggtgggtggatcacctgaggtcaggagtttgagaccagcttggccaacatggtgaaaccccgtctctactaaaaatacaaaaattagctgggcatgtgttgcacgcccgtaatcttagctacccgggaaactgagtcaggagaattgctggaacctgggaggcggaggctgcagtgagccgagatcacaccagtgcactccagcctgggtgacagagcgagactctgttcttccccccacccccaa

SEQ ID NO: 7374 - DNA, 778 bp, Homo Sapiens
  XM_928774
atggcgtcgtggggggttctgggagttgtagtccctgggggagctgcttttacgcagtgttttgaggtgcaggactgcaatgcccgcacttccggaccccagactcttcctacggcgactgacacctcagacacgcgttgtggggggcggcgctctggctccggggctgtgcccagcgcgagcgtggccggcacccacttgctgcagagccggcactgcactggggttcttgggggcggctcctccagacgtctctgcgggttgtcgggtgctgccgagttgggttgggggacgctacaggtagtgggtccggagcagcggctggcccctcatctcactgcccttcctcggaccccaccgtcctctggaagcttgtgcagggcacctgccactgtgaccacctggacgcagatacctgctttcccacaacagcaaggaagaaccatggcccaggggtcactgtcattcggggacgtggctgtgggcttcacccggaaagagtggcagcagctggacctggagcagaggaccctgtaccaggatgtgatgctggagaactacagccacctgctctctgtgggctgaactgtctgcttgcttggaaggcccagctggctcagcacaaatcctttaaccgtttctccccaagagggtgtcaagtcagcaaaccagctgtgatctccagtttggagcaggggaaggagccatggatggaggaggaagagataaggacgtggagcttcccagaaagctgacttcatgagaccgaggatctcgt

SEQ ID NO: 7375 - DNA, 1196 bp, Homo Sapiens
  XM_928876
tggctcttctctggagaaatgttcaaaggccccttgtttaatcggccctttcctcttcatggtggagttgtgggagttctgggcatattctgggccaccaggccctcgggttccaagatgcagctactggagacagagttctcgcacaccgtgggcgagctcatcgaggtgcacctgcggcgccaggacagcatccctgccttcctcagctcgctcaccctcgagctcttcagcctccagaccgtggcgtagcctgcgcctcgggggcatagccagagccactctacttggcctgacctgcaggtcccttgccccgccagccacaggctgggtgcacgtcctgcctctccagctccacagggcagcggcatgactgacagacacgctgggacctacgtcgggcttcctgctggggcggccagcaccctccccacgtgcagaccccatgcgtcccggagcctggtgtgtgggcgtcggccaccagcccgggctcctcaccttgtgaaataaaatcttctcccctagacactcccactcgccctgtgtatctgtggcctagccctagcagggtaggcgggaggaggggaaggagctccctcagcagccgccgccatctgcagaccggacaacgttagggtgagtcaggcatttccgctcagggagtgcacaggtggcagctgggaccaagggtggctggggtgcccccccaccaccatgggctgaggcccctccgcgtagcagcttccagctctgcctcaaggccgggccccagctctggggcttccctttgctgatggaacccggatggaggcacaggggctggggggactgtcctcacagataagggtgcatcgaggagagactgccctctgtgcccatctctccagggccatagaaatacattccatagacctaagcagtatttgaatttttataacaatagcatatgtgtttcttatgtgatttactagaaacaatttaatttctcgagttgtaaaaaggtgtattttaaacctgtgtaaaggtacctggagatcattgtcattcagaataacaaaataaaacagcaatataaaaacacagatattatcatagtacaatgttaaatactataatattcaagatgatattaaaattacatatatctacatctatatgcatataaggatgtcaataaatgatattaatgtctaaaa

SEQ ID NO: 7376 - DNA, 4555 bp, Homo Sapiens
  XM_929061
aagcgattcccctgcctcagcctcctgagtagtgtgggactacaggcgtgtgcaccatgcccggctaatttttttttattttagtagaaacggggtttcaccatgttggccaggacggtctcaatctcctgacctcgtgacccgctcgcctcagcctccgaaagtgctgggattacaggtgtgagccactgcgcctggcctatatgaattttatatttacctgctcccttcaccaggagatcatgctgctgtgatatcgggttttcttaacagcataaggaagacttgcccccttgccctatcaaagagaatagttttggaggggagaagtggggccaaaaaagatgcagttttcatttgtatagggaaatgtgaaaataaaattgccaactcctttagttaaaaacaaaaaaaaaagaaaagaaaacaagacgtggggctgccaaatgcaatactgtggattccacggatcttctactctggaggctaatattatctttgctgaagccagaccaacctgacacaaagaccttttggttttttaatgtgactgtgttttattttagaatgtgtaattcactttagaagggcaaagtacctgtctggggaagactatttaatttcctgaatttatttagaacgttggctgatgttattatgaaggaaaacagctctaacaactgagtgccccccacatagacacagctcatgagttcacagggcaaaggaattgaacagcagcctcctaatagccggccatctttgtgatgtggaaataattatcagcatgtaaaagtctatatatatattcaacaattctgaccccctgcaaaattcaaatctacaactgatttgcttcctgggctcctgaaaacaactttgtcaaaattgttcagaaatataatcagccaatcgttgccccttggggacgcaggataaagcaagtcatccatgaccaatgtggagtcggccgtgcacaattacatgcagacctgcaggacatcgagtccctgctatggtccctccccagtcaggcccccattgcctgggctgcagccagaagcattcaggcacaagtgcattcaaccaatacttacttaattgtattggtggttagagggttgcgattgattaaggtacattaatggatgcatgtcctccctgtatccaagactctgtcatttgtctctgcagttcctcccactgaagaatcggagtatatttctccagtccctaatgttgagttttgaattgtgtctagctttggccactggaatattaatctgtatgaccaaaaacttggaaagtgtgcattcaattgtgctcgctcactcctgctatcaccatgagaacaagcccaggccagactgctgcttccagcagaagataagagacaccaagagcaaagtcgagcttcccagacatgctcatgctagattgaccaatcctcagctgacccatagatccatgaaaataaacgattgttgtattaagccactgagatttggagtgacttgttatgcagcattttgtgacaacaactaactgatacaagggtcaccatcctttatctctgtagattttaaccaatttttaatagctagatggagatcttctagttgcctttatttataatgaatatgactgtagagcttgtttggcctgacactaccagtaacctatccagaaattcagaaatactttcttctccaacccgccccaaccaaccttttgtttgtttgtttgtttttgggttctccctctttgcctaggctagagtacaaatggtacagtcagagctcactgtaacctcaaaatcctgggctcaagtgatcttacccttcagcctcctatgtagctaagactacagacatgtgccaccatgcctggctaatttttttattctttgcagagagagggtctcactatattgcccaagttggtttcaaactcctggcctcaagcagtcctcctgcctcacccttccaaagtgctaggattataggcatgagccaccacacccagcctcttattctttttaaatagaaaccttattttattctgacagtgggttgctttcttttttttttttttttttaagaaaaagttggcccagccccagggaataaattttgactgctctaaacagggttggccaactatagaccaagggccaaatctggccctctgactgtataaattaagttttactggaataaaaccaggtccattgatttatccattgtctacataagcttttaggctacgatggcaccactgtgtcactacgacagaggttatctagaccaaaagcctaaaatattaccgtttgcatctttatggaaaaagtttgccattccctagtctaaggtttagattctgagcttatcattttagcctaaccccccttaccagtgactggctaaaaacaagtctgtgattccattctgactgttctactgagggaattcccccttcttctcatgcagagctgatgagggttagttgtattaataggacatacactcaggttttctgaaaaatacttttatctagaaatgcataggaatatgctggtgcctgaatgtaccatctgggggcctggagattgactcatctgcctccagagctagtgctcacacttactactgagaggcctgaggaaatgcctgcctacccaccaccagaacctgcatatgtcacctggagaactagagatcagcctgccacgcacaccacccaggagcccagtggtgcacctgcccacttggcccagtgctgccactgccagcaaccaaaggagccacctggaggcccagggattggcccacgcagacaggctatcatcagtgcccacaaacactgcccacagtccctagtattgacacacctggtccaccaccgctaccactgatgctgaaggacaagacttcctggcatccccatcctcagcaaagcctcaccacagcctccaataacaactacagtctggccaagtgtggtggctcacgcctgtaatcccagcactttgagaggccgaggcgggtagatcacgaggtcaggagttcgagagcagcctggccaacatagtgaaaccccatctctactaaaaatacaaaaattagctgcgcatggttgtacgtgcctatagtcccagctactcaggaggctgaggcaggagaattgcttgaacccgggaggcagaggttgcggtgagctgagattgtgccactgcactccagcctggtgacagagctagactccatctcaacaaccacaaaaaaaaacactgcagtctaagccactgaatgactcacaggcaccactcatgccaattacagctgaaggaatcatatgcagactataccactgtacccacccagaatcaaagccaaagtgtgatatccaatgaacactgtagatacagctataagaaaaggtctttcccatataaaagccaatccataaaattggaagaaatgactgttatgtcagaggcacagatagtcacataaggatgcaagaaatatgaaaaaggaaacataacatctccaaagaagcacaataattctccagcaacagatccaatgaaaagaaaatctatgaaatgcctgaaaaaaattcagaataatgttattaaagaaactcagggagatacaagagaacacagataatgaatacaaaaaaaaaaaaaaaaaaaaaaaaccaaacaggaaaacaattcagtatctgaacgacaaattcaacagagatagacagcataacaaagaaccaaacacaaatcctggaagagaataaatcattgaaataaatacaaaagataattgacagctttaacaatagactagatcaagcaaaacaaagaatttctgaacctgaagactagtcttttaaaataatccagtcagacaaaaagaaagaaaaaagaatgaagcaaggctacatgacatatgggacacatatgtcaccaaaaactgaaattctgggagttctggatggagatgagatgggtaaaggcatagaaaacctatttaataaaataataactgaaaacttcctgaatgcttccaaatgcaggaagctcaaagattaccaaataaatacaactcaaaaaggtcttctccaaggcacattattgtaaaattgtcaaaagacaaagagaaaatgctaaaaacagcaagagaaaggcatcaagtcacttataagagaatctccatcaggctaacaggggatttctcagcagaaaccttacaggctaggagaaaaggggatgtatactacaagtaaaataaaaataaaaaaatgtaagccaaaaatactatatccagcaaagctatccttcacaaatgaagaagcctggcacagtggctcacatctgcaattccagagactcaaaaggctgaggcaggaggaccatttgatcccaggagttcaaggctgcagtgagctatgatcatgccactgtactccagcctgggtggcagagtgagactccattgctaaaaaaaaaatagtaataataaaagagaaaaaagtatttcccagataagcaaaa

SEQ ID NO: 7377 - DNA, 2722 bp, Homo Sapiens
  XM_929293
atgtgaacatcttttgaatgagccacacttctctacataggcagaaaggttagctccaaaacaccgtttctaggaataaatgtcctatctatgggtggcccaaggtgagttcaggaccaagctcctagaaacacagggaaaatcattcaggtcatcaggtagtcacaggaaaacagctgttctaaagcagggtgcctgtgccccctttgctaattctctgttcgagggatgtgttagggttgagagtttttcctcagatcaggcctgtctgacaatctatcagcaatgaaaaggttatgcttgcaagtggggagccggcttagggagcatccaggccacccaaggcagaacacttcagagaatggccaacccggggtcactgtggggggcacagatgagggtgtcagccattggcgggacttgcagccaagggaacaggccctggggttctctgcaattcacgttcacagcaggacttggtctctccctagaaccggcaggcacagccacaccagctgcttccagtgctgcccagggaggtggtccaaacttccccaggcaccggtggccttgggccccgtgccctctggatttggcttctttacctcagatttcttcctcagttctccttctgcctccccatcaggctgcggtccctcagccccacgtcccatcacgtcactacccccagcccaggccccgaaacatcatcctgaacttagtcccattcttcccaccacgactgtcccacactttccaccacagcacagcagaatcgctggcagggcccttaggcatgcctggcttatcctcctctgtgcccagctctggctgttctccatgctcctctccatgctccttctccattgactaatggtcaaagaccatatcttcttccaaggtggacctcacttgtcaccccaagacaaggcaatctctgccatcaccaggctgagaagaatgatggttagctcatgctgataaaaaagtcgttagtctctgtgttttatgtctattagtgcatccagctttcagagtgatcttaggagatagataacaacacagatgaggaagcttaagttcagtgaggttcaattatttgccttaaatcctatggccagtaggttgactcaggcctaggccgaggcaaggagcccagaatttaaggcatagaatttaaggaggctggcctgcccttgcacaacctgaaagttggtgtgtctttaaactgcatgcctgtcagcctcgcttgcctcattccagtcatgccctgggttgagtaaccaggagatgcaaacaagggagaaggacaatgagcctggaggaattcctgggagcacacatttaggcgccagctgcagctgctggagtgggtaggctgaggacccactgtcctgcttgaaccaggcagggtgcacagagccgtagccaaccttgtctgtccaaccctgcctgcagtctcagccatgtggctacaccccattcctcctaccagagctcatgtgcctctgtctacactttctggtggccctgggctcttcacagaaattgacattgcgattttcagttcttgtttgcctcttacttgattttaggcttcctgaggacaatttgtgtctaagtcacaatgacacttaacacttggaagatgaggaataaatgttggaaggacaaatgaaccaaatggtgtatgggccaagtgtggtggctcatatctgtaatctcagcactttgggaggccgaggcaggaggatcatttgagctcaggagtttgggaccagcctgggcaatatagtgagacctggtctctactttaaaaaaaaaacttaaaaattaggtgggtgcattggtgtatgcctgtagtcccagctagtcaggaggctgaggtgggtgaatcatttcagcccgggagatcaagaatgcagtgagatacgatcacacactgcactccagtctgggcaacagagcaaggccctgtctcaaaaaaacaaaacaaataaaaaacaaaaatagtgggtgaacagagtagtaaaccaatggccagtgcaagcttgccacataggagatgaagaaggaccacccactgccccataattcagaactagggccaggggttagagccctctccacagtctactggacataacctaagcaatgactgcagggcacggaagatggcatagaggatgtgttttgtcctttctggaggccctttcctctttgtgcttagagcacacgagccatttaggtatcaaaatcacattgtctaactttgactctacactcaaagccatctgatgctcacatttcatgtagtcagaggaggccatctggtttgaatcaacatccggaagttacagggtgatgcttagagagggcttgtgcttccccagccacacatctccataaagatgtaagaggtaattatttcagctgggtgcggtggctcatacctgtaatcccagcactttgggaggccaaggcaggcagatcacctggtcgggagttcgagaccagcctgaccaacatggagaaacgccatctctactaaaaatacaatattagccgggcgtggtggtgaacgcctgtaatcccagctactcaggaggccgaggcaggagaattgtttgaacctgggaggcagaggctgcagtgagccaagatcgcaccattgcactctagcctgggcaacaagagtgaaacttcaactcaaaaaaaaaaa

SEQ ID NO: 7378 - DNA, 4556 bp, Homo Sapiens
  XM_929413
ctgaggtaggcggatcacctgaggtcggcagtttgagaccagcctgaccaacatggagagaccccatctctactaaaaatacaaaattagccaggtgtggtggctcatgcctgtaatcccagctacttgggaggccaaggcaggagaattgcttgaacccaggaggcagaggttgcagtgagccgagatcacaccattgcactctagcctggtgaaggagcaagactccatctcaaaaaaaaaaaaaaaaaagaaagaaagaaaaatacacattcagaggagacaaaaaataaaaaacaatgatgcatgcccacaggatctagaaaataacttcttaagggcaaatctaggagttattggccttaaagaagagatagagaaagagataggaatagaaagtttgttgaaagggataataacatagaacttcctaaacctacagaaagatatttatatccaagtacaagaaggttatagaacaccaggccaatttaacccaaagattacctcaaggcatttaataatcaaactcccacaggacaagggtaaagaaaggatcctaaaagcagcaagagaaaagaaacagataacatacaatggagctccaatacatctggcagtatatttttcagtggaaaccttacaagccaggagagagtgacatgacatatgttaaagtgctgaagggaaaaaaccttttaccctagaatagtatatccagcaaaaatatccttcaaacatgaagaataaacaaagacttccccagacaaacaaaagctgagggatttcatcaacactagactggtcccataagaaacgcttaagggagtactttggtcagaaagaaacagacattaatgagcaacaaagaatcatctaaaggtaaaaaactcactgttaagagtaagtacacagaaaaacccaaagtgtgataacattgtaactgtggtgtgtaagtagaaagaataaatgataaaccaatcaaaaatagtaactacaacttttcaagaccagtcagaaaaataagataaaattagaaacaacaaaaagttaaaaagtggggggatgaagttaagatgtagagtttttattagttttttgtttgttaatgcaaacagtgttaccaggttaaaataatgggttacaaaatagtatttgtaatccttatggtaacctcaaacctaaaaacatacactggatacataaaaaataaaaagcaaaaacctaaatcatatcaccagagcaaactaccttccctaaaggaagacaggaagaaaagaaagaagaagaccacaaaacaaccagaaaacaaataaataacaaggcaggagtaagtctttacttatcgataatacattgaatggaaatatggactaaactctccaatcaaaagacatagactggctgaatgaatggagaaaacaagacccattgatctgttgcctacaagaaacacacttaaactataaagacacacataggctgaaagtaaagagttggaaagagttattccatgccaatggaaaccaggaaaaagagaaggagtattgattttgatacaaaaactatgagacaaataaagtcactatacaatgataaaggggttaatatggtttccatttgtgccccacccaaatttcgtgttctattgtaatcctcaatgttggaggtggggcctggtgggacgtgattagatcatgggggtggatctttcatgactaattcagcaccatcttcttagtgctgttctcatgatagtgagttcttctgaaatctggttgcttaaaagtgtgtagcacctctccacaccacccgcttgccttggtctactcctgctatgtagatgcttgctcccactttgcattattccatgagtaaaagctccctcaggccttcccagaatcagatgccgctatgcttcctgaacagcctgtggaactatgagccaattcaacctcttttcttcataaattaacaagtcttgggtatttctttatagcagtgtgagaacagaataatacagaaaattggtaaagaggagtgaggcattgctagaaagatacctgaaaatgtggaaacagcagtggaactgggaaatagacagaggttggaagagtgtggagggctccgaagataggaagatgaggggaagtttggaatttcttagagatttgttaaattgttttgaccaaaatactgatggtgatatggacaatgaagtccaggctgaggaggtctcagatggagatgagggacttattgggacctggagtgaaggtcacttttgttaggacattgtggttggagacattgtgcccctgccctaggaatctgtggaactttgaacttgagagcgaagatttagggtatctggcagaagaaatttctaagcagcaaagcgttcaagacgtggcctggctgcttctggtagtctgtgctcatatttgtgagcaaagacatgacaagaaactggaacttatatttaaaaaggaagcagagtgtaaaagtttggagaatttgcagcctggccatgttgtagaaaagaaaaaaaccattttctggagaggaattcaagctagctgcagaaaattgcaagtaacaaggagcaaaatgttgatagccaagatagtgggaaaaacaccttgaaggcatttcagataccttgggggcagcctctcccatcacaggcccaaaggcctaggagggaaggatggtttcctgggccaggctcagggtcctgctgccctgcacaacctcaggaaactgctctccaaatcccagctgctccagctccagcttcagctcaaagggccccaggtatagctcaggctgctgctccataggatgcaagttataagccttagtggctcccgtgtggtgttaaattaagcctgtaggtgcacagagtgcaagaattgaggcttgggagcctccaactagatttcagagtatgtgtgggaaagcctggatgtccaggcagaagccagctgcagggacagagccctcatggagaacctctactagggtagtgtggaggggaaatttggggttggagttcccacacagcttcccctctggtgtactgcctagtggagctgtgagaagacagccactgtcctccagattccaggatgatagatctgccaatgacagcttgcactgtacaactggaaaagccacaggcagtcaatgccagcccgtgaaagcagtgacagtggcttaccctgcaaagtcccaggggctgagctgcccaaggccttgggagcccaccccttgcaccagtgtgccctggatgtgagatatggagtcaaaggagagtattttggagctttaagatttaatgactacctgctgggtttcagacttgcatgggtccagtagcccctttcttttggccaatttctcacttttggaatgggagtgtttacccaattcctgtacccccactgtatgttggaagtaactaactgtttttttattttgtaagctcacaggtgggagagacttgccttgtctcaggttgagactctggactttggacttttgaattaatgctggaatgagttaagactttgagggactgttgggaagatataactgtattttgcagtatgagaaggacatgagatttgggagacaccagaggtggaataatatgatttggatctgcatccccaccaaaatctcatgttcaattgtaatcctaaattttggaggttgagcctggtggaagaggattggataatgggggtggtttctcatggtttaacaccatccccctgggtgctgttctcatgacagtgagtgagttattgtgagatctgattgtttaaaagtgtgtgccacctcctcccactttcctcctgctccagccatgtaagacaggcttgcctccccttcaccttttgtcatgattgtaagtgttctgaggcctccccagccatgcttcctgtacagcctgcagaactgtgagccaattaaacctcttttctctatatattacccagtctcgggtatttctttatagcagtgcaagaatagactaatacagggttcaattcagcaagaggatataacaaatataaatatatatgcactcaacactgcagcacccagatatataaagcaaatacgattagagctaaagagagagagtgaccccaatacaataatagctggagacttcaacaccacattttcagcactggacagatcttccagacagaaaataaaaaagaaacatcagacttaatctgcactgtagatcaaatggatctaatacatacttgcagaacattttatccaatggctgcagaatacacattcttttttagcacatgtatcattctcaaggatagaccatatgttaggtcacaagtcttaaaacattaaaaaagttgaataccatcaagcatcttctctgaccacagtggaatacaactagaaactaataacaagaggaatttttgaaactacaaatacatgaaaattaaacaatatgctcctgaatgaccattgagtcaatgaagaaattaagaaggaaattgaacaatttc

SEQ ID NO: 7379 - DNA, 396 bp, Homo Sapiens
  XM_929431
tggctgcaggctccaaacaggcatgcgaggtgcctttggaaagccccagggcactgtgaccagggttcacattggccaagttatcatgtccatccacaccaagctgcagaacaaggagcatgtaattgaggccctgcgcagggccaagttcaagtttcctggccaccagaagatccgcatctcaaagaagtggggcttcaccaagttcaatgttgatgaatttgaagacatggtggctgagaagcagctcatccctgatggctgtggggtcaagtacatccccagtcgtggccctctggacaagtggcgggccctgcactcatgagggcttccactgtgctgccccctcttaatactcaccaataaattctacttcctgtccaaaaaaaaaaaaaa

SEQ ID NO: 7380 - DNA, 1538 bp, Homo Sapiens
  XM_929460
gaatctgaacaaataggcctcgctgagttccccagattattactattagatcacactcttttgtcctccaattacacttctgcacaactgtccctaaacacacatggttttccctgggtccttggggcttcgttttctgaaggtttctgtgtcactgaaaacttacattaaatataacttttatacttttcccatttaatcttttttttttttctttttatttgttataggggctcagccatgaaccttgtgatggatgaggaaaagatattctttttctccccttacagtttctggcagccaacatggggtggctgtgacaccccactagttccagaacctgcagatgagatcctgggacaaccaataaaaaaacaacaaaaaggagctgcttccacctgtctcctgtgcccttggtttctgctaatcctacattccaagaataaaagtcttcctatgcgttcctaggcagaagccaagtttccctgctttgggcacgttcaaaatagaaggtattttccgcttctcttgcttctgagcacccacgaaatcaacacatccccaaaacacgcgttgagggagtaagggaaagtgtcctgcacccgccaccctcccgcgctaagagcggcagaggaccccacagcttcgtacttccccggaggagctcctggagtaggagacggcttctagcctggaagaaccccgggtgcgacagttgtgccaggaaacttcaagagtattccctcggctgggcgcacgcagtacatccccaatgctccaatttgaactttgactcggccacgaccaccccactccagtctcactctacggtgctttctcccctgttggtgctgagggcttttgagactacctgccccgcgctccctaagtccgagggaccgaggcgaggacctgtcccgctgagctggcacgacccacgcagggcaggcggcacttacgcggcgcagtcggtgctcctccctgagccgcggcgcgcaaggaccccagccggttgtccttgcagcgcttcccaaatcaggcagaagtgaggcagccccacccagtcacgaggaccctgcagaactcgagcctttaagcgctcctctaggctcacatgacccagacccacagggcaaaaagtgcgtcgtcgtgtcccaacctcctggtcccagaaacctggccgcatcaagtcagcgcttcccatgctggaagaagcaagcagccccagggtggaatcttaaaaattaatgaagagcatcggcggggtgccattcaggacttacttgcaagcccaggatttacatttggaaagcgagtggtgtttgattcccactgtttaaaaaggcaacacacgttcgctgatggtctacattccagctgcactagcattcccctgagtgaaatatggcatacattaaccagaagagaaaattacatttattaaaataattaaaacagagtcaaaagaagtaaacgttcaaatgagttttgtaagtttgtagcatttcgacttaagaagttattaaagcttaaaactg

SEQ ID NO: 7381 - DNA, 2774 bp, Homo Sapiens
  XM_929667
aattccaggaccagagatctggccctggcctattttctcttgctgtgtacacacacgcacacatgctgggtggcaggatctcgcccgctggagggtggtggagcccagtagaattggggtgactgggcataaacctgctgagactgcttccttccctggttgtgagtgatgtgaatgcctgccttccccggtcagcacttagaagcccttgataggcagcatttggcgacttgtggggcaggtgtttgggataaatcctaccttcatcctaggacttatttctgcatcagccttttaactcaggcacttcaggtaacgtgatctatgtgtgttttgactgaatctcatctcctgtgtttccctgtgcagtctagggaagcatgtctccagtctttgtccctgtcttgtcccaaccattaattctcatgtcacagcttctcactgcatgtgacaagagccaggcctatctgctagggccctgcggctgaggtctgacctggaccctcatgcccgagtcggaagacccctctccagaagccattctgcatccttgtctgctctgcgtcacccgagaacacaggcttcgcagcctcgctttctgaaatggtgtgtgccgagtcagattgccgctcagagaaaatacaagcccgttttccctagctgtgccatttggtgctctgccaggctgccgtgcaagggaataccgacgagacgagctgcactgtctctgatttggagccctcaccggagcttgtctttaaaaatgagcaggaagctcatgtatgtttgcatttcagtgagccgggtcctgacctgccgccacccatcacggtcagcgtggtgcatcttaccgaggaggcgcaggcctggattcttttgagtggtgctactgcctaggaagtaacacgtggagaatttccatcttgggaccatgcacacagtgccttggggagtagattttgccctaatagcgatgaagaattttatcagtcagtggagttcctttttcagatcagggatgggaaagagccaaactgggtacctcccacgtgtgccccgtgaacagccctttgcagctgggctgtggggcttggctgctgccctgtcccatctggcagttaacgccttctccctgctctgccccccactccccaaaaccagttgcagcctcaacccacatggggatgtagaaagccgtaaagtccacgctactgttgaaaatgtttacatctccgctctcaacctgccttgggttcgtgttaaatggtgttaaattctgcaaatggaggggaaaaaaatcaaattctaaatttcaaagtagaatttaaagcaaatttgtaaaaaaattatcctaccaccccttttggtccacttaagatatgccacgctgaagcaaggtatttcctactggattttgctttcactggtgtttagaaaataaacttgatttctctaggagcactcctttggttagagggatgcaagaaggagaggtgaaggtggcgtgtggtggctcatgcctgtaatcccagcactttggggaggccgaggcaggcggatcacttgaggccagcagtttgagaccagcctggccaacatgatgaaaccccatctctactaaaaatacaaaaaattagctgggcatggtggcaggcacctgtaatcccagttacttgggaggctgaggcaggagaattgcttgaacccaggaggtggaggttgcagtgagctgagattgtgccactgcacttcagcctgggcgacagagtgactctgtcaaaaaggaaaggcaaaaaccggaccctggagctctgtgggccctgattgcaggcccctccctgtgtgatgagggatgagtcagcttggggagccacttggccagcctgcatgcctggtcatcaggaggttgagaaaagccttgaaagttgtgaagcactgagcagatacaagtgtttgttaattttgtagaaattaactttcccatctggcctttatctccaaagttggtattgttgctccacgcagactgcagtccggtttcttattgtgactttgacaatgcaaagtgcaaaataggaagaggcctccccaccccactatcccaccctggtgaccaattcagtgtaacctttgcacgtactcagtcattggtgtctttggagtgacatctgcagccagttagtgccacctgagtacagcactcgtacttttacatgatgtgtgtgtgagtagctcttctgtccaaaccatgatttgaggttcaactacctgtagatcaaagctttattttagaacgataaactgattttttccaaatgggtgaaatcttctccccatgactatgttttcttaactttgcattgaatctatttactgggttacattctatgtgtagtttgctttcttcatttttttttcttttaaaatgctcatgtcttattccaagcaccttcctccaaagtccccataaagctgcatctccaacacattgttatgccaataaggttttatttaactttatttaaggatgattgtgtctttgaatgacaaatgtactgctgcttcctacctgcaagacgaacaatgtatgtttcaagggtgagcaagtgttatttcttaaatttctcaaatgcctgtagtaactattgtttctgcctctcaattgttgccagctctttgaagaaggggagaattgtgtgtttttgtgtggggatgtttctgatatgctgctacagttgcaaaacactggagctagagaaaataaagtactgatc

SEQ ID NO: 7382 - DNA, 1019 bp, Homo Sapiens
  XM_929774
tctgcctgcttccagacgagcaaggagactcatggtctggttcttggacttccctaacagcatggcccctaaacgccagtctccactcccacttcaaaagaagaaaccaagaccacctcctgctctgggactggaggagacatcggcctctgcaggcttgccgaagaagggagaaaaagaacagcaagaagcaattgaacacattgatgaagtacaaaatgaaatagacagacttaatgaacaagacagtgaggagattttgaaagtagaacagaaatataacaaactccgccaaccattttttcagaagaggtcagaattgatcgccaaaatcccaaattttggggtaacaacatttgtcaaccatccacaagtgtcttcactgcttggggaggaggacgaagaggcactgcattatttgactaaagttgaagtgacagaatttgaagatattaaatcaggttacagaatagatttttattttgatgaaaatccttactttgaaaataaagttttctccaaagaatttcatctgaatgagagtggtgatccatcttcaaagtccaccaaaatcaaatggaaatctggaaaggatgtgacgaaacgttcaagtcaaacgcagaataaagccagcaggaagaggcagcatgaggaaccagagagcttctttacctggtttactgatcattctgatgcaggtgctgatgagttagaagaggtcatcaaagatgatatttggccaaacccattacagtattacttggttcctgatatggatgatgaagaaggaggagaagatgatgatgatgatgatgatgatggtgatgaaggggaggaagaattagaagatattgatgaaggggatgaggatgaaggtgaagaagatgaagatgatgatgaaggggaggaaggagaggaggatgaaggagaagatgactaatagaacactgatggactccaaccttccttttttaaaattttctccagccctgggagcaagttgcagtcttttttttttt

SEQ ID NO: 7383 - DNA, 1500 bp, Homo Sapiens
  XM_929895
gtggcagggcaggggtgcggagggaccgacggacgcacgggcgggcggccgggagccatggagcgcggccctggggcccgggggcgcgggccggggtgggcttcccacggcacgacatggagacctgtggttgcgaggctccctggggctcggcttggaccgcgatggggctgggccctggcctcctaacggggctgctgtctggggcggtagctgggggggcgctctcccccctgcccgcgactcggagcaccccacccctcccctgccgggccaggccgggcggcgttgttggcgggggccccggtggaggcccggcccgggcggcgcccgccatgaacgggctgtcgctgagtgagctctgctgcctcttctgctgccctccctgccccggccgcatcgctgccaagctcgccttcctgccgccggaggccacctactccctggtgcctgagcccgagctggggcctggtggggccggggccgcccccttggggaccctgagagcctcctcgggcgcacccgggcgctggaagctgcacctgacggagcgtgccgacttccagtacagccagcgcgagctggacaccatcgaggtcttccccaccaagagcgcccgcggcaaccgtgtctcctgcatgtatgttcgctgcgtgcctggtgccaggtacacggtcctcttctcgcacggcaatgccgtggacctgggccagatgagcagcttctacattggcctgggctcccgcctccactgcaacatcttcacctacgactcctccggctacggtgccagctcgggcaggccttccgagaggaacctctatgccgacatcgacgccacctggcaggccctgcgcaccaggtacggcatcagcccggacagcatcatcctgtacgggcagagcatcggcacggtgcccaccatggacctggcctcgcgctacgagtgtgccgcggtggtgctgcactcgccgctcacctcgggcatgcgcgtcgccttccgcgacaccaagaagacctactgcttcgacgccttccctaacatcgagaaggtgtccaagatcacgtctcccgtgctcatcatccacggcagggaggacgaggtgatcgacttctcgcacgggctggcgctctacgagcgctgccccaaggcggtggagccgctgtgggtggagggcgccgggcacaacgacatcgagctctacagccagtacctggagcgcctgcgtcgcttcatctcccaggagctgcccagccagcgcgcctagcggcggccccaaccagccggacctcagcaataaggcggcccccggacctcaccccgcgccggcccccacccaggggctgcatgtggacccccccgggcggcccaggggaccccgccccgacccaggggctgtggacgatgtacaggcaacagagctacgcactcctttccttttggaagcaagaagaaaatacgtgaaaacggaaattaaagatttaaaattaaaaaaaaaa

SEQ ID NO: 7384 - DNA, 1470 bp, Homo Sapiens
  XM_929970
atgacaaacaggaccgagaacaccaggcctctgttcaggatgaatcggcacatcagaacagtggctggcactgccaggtctgccaagtcaaagtttctcctcctcctgcaagtgttcactgacacccacctccagctcccaccctgtgacagccagagtgtctctttgctcatcaggttcttagagctgttggtcccattctttaactgcaagaaagaggctcctgattgctcagatttcattcaccaccagaccacatttgctaggttgatgccttgtccaaggggttcctgggtaaagggcgctgtgcctgaagaacttcacaaacactaaggacagaccctcttcctgcaatgccagtactcacccaagagagggtcctatcagcccaaatcctggtgtcagcagacatcgccaagtcggtgtaccttacttgtcaccagctccaagccccagacagcagttcagaagtctcattacacaatctgggacaagccaaatgctagcatcttcaaaatcaccatgattcagctgaaggaggactcgggatcctactggtgtgaaatctacaacacttccaaaaacatcatcactgttctcagagatgtcagcctggtggtgtttgcagccccaaccacgtctcctacgtggaccctcacctggctcccaacaaacacagatggggccatccagttgcaggaaaacaagctcagggattccacagattctgcattatggaaatcaagtgcccccatctgccttggctcagctggccccaaactcctggtctctgtgttgtgtggactcctcctggccaagggcctgatgctgtgagtcctgtttgtgttcctgacctgcaggtgccacaggacagcagtgatggaggtttctgattgtatcagcccagccttgccccaggacccttgggtgcatgagtcacagcatggatccaggatgaatcccagttcttcccctgcccagctattgggagctgccctaagcgttgccccccatttgtctgtgaggaaaggccagcactaagcctattggagagaactttcagcccctgatctccctggtggtgacccctcacccctgcactgacccctcttagatctacttcccctgccctgactttcgccattggaaagacctggggtgggggtttctgcatccgggtcaacgctcagctcagcatcttcagctgtgcccgggctcctctccagcactccgtggttctctcagccccacctcagcaggtctccaggatgcctcacattttccctgtttgttagtggtctacccgagagtcctatcaatttcctcttgtgcttgattaaattcaacctctgaactgaaatgtgtcagaggcaactaagcaagaaagcagatgtatcccctcaccctcctcccctcccaccctaaatgagaaagaaatgacttaaaaataaataataaaattgaaactaa

SEQ ID NO: 7385 - DNA, 1114 bp, Homo Sapiens
  XM_929980
atgatggctgcctgtgacccccgccacggccgatacctcaccgtggctgctgtcttccatggtcggatatccatgaaggaggtcgatgagcagatgcttaacgtgcagaacaagaacagcagctactttgtggaatggatccccaacaacgtcaagacagctgtctgtgacatcccacctcgtggcctcaagatggcagtcaccttcattggcaatagctcggccatccaggagctcttcaagcgcatcttggagcagttcactgccatgttcggcaggaaggccttcctccactggtacacaggcgagggcatggactagatggagttcaccgaggctgagagcaacgtgaacgacctcgtctctgagtatcagagtaccaggatgccaccgcagaagaggaggaggattttgttgaggaggccgaagacgaggcctatgacagagcccccatcacctcaggcttttcagttcccttagccatcttactcaactgcccctttcctctccctcagaatttgtgtttgctgcctctatcttgttttttgttttttcttctggggaggtctagaacagtgcctggcacatagtaggcactcaataaatacttgtttgttgaatgtctcctctctctttccactctgggaaacctaggtttctgccattctgggtgaccctgtatttccttctggtgcccattccttccatctgtccagttaatatttctctcttaaaaatctccaagaagctgggtctcatccagatgccatttagaaccaaccaggtgctgaaaacccatgtagataatggccaccatcctaagcccaaagtagaagatggtagaaggcagtgggtagaagtcactatataaggaaggggatgggattttccattctaaaagttttggagagggaaatccaggctattaaagtcactaatttctaagtatgtccatttcccatctcagcttcaagagaggtgtcagcagtattatctccactttcaatctccctctaagctctactctttggaggtgtctgtcccactctgtcaagtggaatcctttcctttccaactctacctccctcactcgagctcctttcccctgatcaga

SEQ ID NO: 7386 - DNA, 2637 bp, Homo Sapiens
  XM_930054
gggagaggcactcgtgtgatgcgctgaatctctggctgggagaacagctgaagcagctggtgcctgcgagcggcctcacagtcatggatctggaagctgagggcacgtgtttgcggttcagccctttgatgaccgcagcaggtatgatctcgtgaaaccttgagagaaactgaatgaggaatgaaactattgttcctgtttcacacagaagaaaactgaggttggcactcatgatgagcccctgttctcattctgcaaatggtgaagctctctatcgtcctgaccccacagttcctgtcccatgaccagggcccgctcaccaaggagctgcagcagcacgtaaagtcagtgacatgcccatgcgagtacctgaggaaggttatcaatactctggctgaccatcgtcatcgtgagactgactttggtggaagtccttggataattatcattattgtgtttctgggacgttacaaatttaccattctcttctgcacaatttacctttgtgtgcctttcctgaagactatcttctggtctcgaaatggacatgatagatccagggatgtacagcagagagctaggaggtccaaccgccgtagacaggaaggaattaaaattggcctggaagacatctgtactttatggaaacaggcggaaacaaaagttcaagctaaaatccgtaagatgaaggtcacaaagaaagtcaaccatcattacaaaatcaatggaaagaggaagaccgccaaagaacagaaaatgtttcaacgtgcgcaagagttgcggtggcgggcagaggactaccacaaatgcaaaatcaccccctctgcaagaaagcctctttgcaactgggtaagtttgtttgttttccttgcttttggacagtctgccaggtcaggacatggatacatttttctccctacagctctgtgctcaagccctgcagagggagatggcagagaggaaggctgcctacaagcatcacagtcccatccctgttggtaaccgtgttgtgcaaaaacaccttcatccccacccagtggggcccctgatctaatattcaaagtgtcagaggttccatatttgtaatagcaaatgggccctgactgtaaattagtgaagagtgaatgtaacttattacccacagggacaattccaaatgaaggccttaaatgatgctcagctaagctggttcttgtgtggcctctgtaccttcaaaagctgccgagtcctatgattacacgtgatgggacttgtacacttgaagtgaaacagttttaaaacttgctttgtttagaattcccacctcatttttccatggacaaaagtattctttatgtcctagtgcacttacaatttggtattacctgggagtgaaaagaaatattacagccatgcctaactgacttcttgaggtaagattgttctgtcagaaaaccctctcccagttcccctgcagctcttcaggaatccacatctctgcagagctctttgttctcatgggtggcacctccagagtgaagaagatcctttatcaagaagggaaacaggggaaatgagagggtcctgcaggcagagctggaatcaacttccactctgcctcttgcaagctgtgtgaccccgggcacaatttctccttcctctggaaacctctgttttcttagatttggagcagggtggtcacactgaccttgcagagttccgagaatcagagacagaacataaaaggcctggaaaacattctccaaaaagaagctgcaacatgtgtggacaatgggcttttcatgcctctcttactgtctgttgacctggtgcaagaaacatgctctggtgatggctgtgagggaggaatgaggatagacatagacactcctgtgtctcaaacatgcctctttattactctgttatgactctgtcttccctggggcaggaccccagcctgcctacatttgcagacagacacagtggcatgtggagacaacagtgtgtcccaatgacttttctttactccccagctgtcggcagtactcagtggaagggtgatattatgacactgatactgctattttgaaacctggaggatggaaaggtgcaaaaatctatcaccagcaacagaaggtgcagaccgtgttggtggcggtaattttgtccatcaaatgaatatgtgtgaaaacattcccttcttcggccctacaggtcagaatggcggcagcggagcatcgtcattcttcaggattgccctactggccctacctcacagctgaaactttaaaaaacaggatgggccgccagccacctcctccaactcaacaacattctataactgataactccctgagcctcaagacacctcccgaatgtcttcttattccccttccaccctctcctcttccaccctccgtggatgataatctcaagactcctcccttagctactcaggaggccgaggcagaaaaatcactgaaacccaagaggcagaggttgagtaagctgagaacaggtcattgcactcaagcctgggcaataagaagaaatctgtgagtggaacaaaagaaaaaaatcaaaaaacaaaacaaaacccacactccaaaaacaaactaacaaagaataaataaataatataaaaataaaataaatact

SEQ ID NO: 7387 - DNA, 1600 bp, Homo Sapiens
  XM_930178
ttttttttttttttttttgagacggagtttcacgcttgttgcccaggctggagtgcaatgacgagatctcggctcaccgcaacctccgcctcccgggttcaagcgattctcctgcctcagcctcctgagtagctagaattacaggcatgcaccaccacgcccaactaatttttgtattattagtatagacggggttttaccatgttggccaggctggtctctgtctcccgaactcaggtgatgtgcccgccccgcctcccaaagtgctgggattacaggggtgagccactgcgcccagcctaaaacacaaagccttaagagtgttttagtgagctaagccatgataacagtgccacatgacaaaataactgagtaactcctcaccgttcttagtcccaatcaggcagttgacatatgctgtcaactttatcttaaaagtatttctgttcatttaacagggccaacgtatccatcagacagaaggcacagtgcttggggcccatgatacatttaggagcacacaaaaagtgtcttaatattttcttttaaaaatcagcttcttttccgagaaaacaccaaatggcggatgacgccggtgcagcgggagggcccggaggccctggtggccctgggatggggaaccgcggtggcttccgcggaggtttcggcagtggcatccggggccggggtcgcggaggcaaggccgaggataaggagtggatgcccgtcaccaagttgggccgcttggtcaaggacatgaagatcaagtccctggaggagatctatctcttctctctgcccattaaggaatcagagatcattgactttttcctgggggcctctctcaaggatgaggttttgaagattatgccagtgcagaagcagacccgtgccggccagcgcacgaggttcaaggcattcgttgctatcggggactacaatggccacgtcggtctgggtgttaagtgctccaaggaggtggccaccgccatctgtggggccatcatcctggccaagctctccattgtccccgtgcacagaggctactgggggaacaagatcggcaagccccacaccgtcccttgcaaggtgacaggccgctgcggctctgtgctggtgcacctcatccctgcacccaggggcactggcatcgtctccgcacctgtgcctaagaagctgctcatgatggctggtatcgatgactgctacaccccagcccagggctgcactgccaccctgggcaacttcgccaaggccacctttgatgccatttctaagacctacagctatctgacccctgacctctggaaagagactgtatttaccaagtctccctatcaggacttcactgaccacctagtcaagacccacaccagagtctccatgcagcggactcaggctccagctgtggctacaacgtagggtttttatacaagaaaaataaagtgaattaagcgtgaaaaaaaaatcaaaataaaaaatgaaaaataatatataactactccaggttagaatattttaatctaggaagggggggacctatgaaggcaaatgtacctggggctcacaaaagtcacaacatggccccaccatgggaggg

SEQ ID NO: 7388 - DNA, 747 bp, Homo Sapiens
  XM_930239
ttctcctttccccgatctggcctcacaggaggagttggcggggagccttgggcccctctggcctcagccggatttcccagccaaacgcagagagagatgccctggaccatcttgctctttgcagctggctccttggcgatcccagcaccatccatccggctggtgcccccgtacccaagcagccaagaggaccccatccacatcgcatgcatggcccctgggaacttcccgggggcgaatttcacactgtatcgaggggggcaggtggtccagctcctgcaggcccccacggaccagcgcggggtgacatttaacctgagcggcggcagcagcaaggctccagggggacccttccactgccagtatggagtgttaggtgagctcaaccagtcccagctgtcagacctcagcgagcccgtgaacgtctccttcccagtgcccacttggatcttggtgctctccctgagcctggctggtgccctcttcctccttgctgggctggtggctgttgccctggtggtcagaaaagttaaactcagaaatttacagaagaaaagagatcgagaatcctgctgggcccagattaacttcgacagcacaggtctgtgcctccacactcctgactccagtggggaaaggattacacctccaaatgccatcaggcctcatcacacaccaatcaaatttcttctgtgactgcttgttccctttagggtcaaaacacaccctcgccacctcttcccctgg

SEQ ID NO: 7389 - DNA, 270 bp, Homo Sapiens
  XM_930423
atggaggcgaccttggagcagcgcatagaagatacaatgaagaatccctccattgttggagtcctgtgcacagattcacttaatctgggttgccatgggaccctgtcagatgagcatgctggagtgatatctgttctagcccaacaagcagctgagctaacctctgaccccactgatactcctgtagtgtgtccagcatcagataatgggaacattatgatccagaagcatgatggcttcacagtggcagtacacaaaatggcctcttga

SEQ ID NO: 7390 - DNA, 424 bp, Homo Sapiens
  XM_930460
atggttttgggggcaaaaaaaagaagcaagttctgaagttcactcttgattgcacccaccctgtagaatcatggatgctgccaattttgagcagtttttgcaagaaaggatcaaagtgaacggaaaagctgggaaccttggtggaggggtggtgaccatcgaaaggagcaagagcaagatcaccgtgacatccgaggtgcctttctccaaaaggtatttgaaatatctcaccaaaaaatatttgaagaagaataatctacgtgactggttgcgcgtagttgctaacagcaaagagagttacgaattacgttacttccagattaaccaggacgaagaagaggaggaagacgaggattaaatttcatttatctggaaaattttgtatgagttcttgaataaaacttgggaaccaaaatgcaaaaaa

SEQ ID NO: 7391 - DNA, 954 bp, Homo Sapiens
  XM_930551
tgagctctttcccatcttgcaagatggcgggtgaaaaagttgagaagccagatactaaagagaagaaacctgaagccaagaaggctgatgctggtggcaaggtgaaaaagggtaacctcaaggctaaaaagcccaagaaggggaagccccattgcagccgcaaccctgtcattgtcagaggaattggcaggtattcccgatctgctatgtattccagaaaggccatgtacaagaggaagtactcagccgctaaatccaaggttgaaaagaaaaagaaggagaaggttcttgcaactgttacaaaaccagttggtggtgacaagaacggcagtacccgggtggttaaacttcgcaaaatgcctagatattatcctactgaagatgtgcctcgaaagctgttgagccacagcaaaaaacccttcagtcagcacgtgagaaaactgcgagccagcattacccccgggaccattctgatcatcctcactggacgccacaggggcaagagggtggttttcctgaagcagctggctagtggcttgttacttgtgactggacctctggtcctcaatcgagttcctctacgaagaacacaccagaaatttgtcattgccacctcaaccaaaatcgatatcagcaatgtaaaaatcccaaaacatcttactgatgcttacttcaagaagaagaagctgcggaagcccagacaccaggaaggtgagatcttcgacacagaaaaagagaaatatgagattacggagcagtgcaagattgagcagaaagctgtggactcacaaattttaccaaaaatcaaagctattcctcagctccagggctacctgtgatctgtggttgccctgacgaatggaatttatcctcacaaattggtgttctaaatgtcttaagaacttaattaaatagttgactacgttaaaaaaaaaaaaaaaaacaaagaaaaaa

SEQ ID NO: 7392 - DNA, 1492 bp, Homo Sapiens
  XM_930558
ggttccagggtgcacaccactcctcgtagcaggtcccctgtcttgtgtgctgtgtccccccgaggtatgctggtgctggtggcccaggcaggaggtgacactctcaaagtgactggtcactacgtaaaatgtgtctttcttttgtttgtttcccacctgctttccgagcccctttctcggacagttgaccacggcatgtttgagaatttgaacacagccctcactccaaagctccaggccagccgctccttcccccacttgtccaagcccgtggcccccggctctgcccctctgggctctggtgagcctggggggccaggactctgggtgggcagcagccagcacctcaagaacctgggcaaagccatgggggccaaagtgaatgacttcctgaggagaaaggagccctccagcctgggcagtgtgggtgtgacagagatcaacaagactgcaggagcacagctggccagtgggactgacgcggctccagaggcttggctagaggatgaaaggtcagtcctgcaagaaacatttcctcggctggatcctccacctcccataaccagaaagcgaacccctcgggccctgaagaccacccaggacatgctgatttcatcacagcctgtcctcagcagtctggagtatgggacagagccatcacctgggcaggcccaggactccgctcccactgcccagcctgacgtcccagcagacgcttcacagccagaggccaccatggaaagagaagagagaggcaaagttctgcccaatggagaggtttccctgtcagtacctgacctaatccacaaggatagccaggacgaatccaagctaaagatgactgagtgcagaagggcctcctcccccagccttatcgagaggaatggcttcaaactcagcttgagccccatcagcctggctgagtcctgggaggatggcagcccccctcctcaggcacggacctccagcctcgacaatgagggccctcacccagacctgctgtcctttgaatagagcctctgctctttcctgctgagctctgcccttgtcttcctgctgctttctcctccactgcgcacactggccctggcctcaactccgctgtgccctttgtcttccttgtatgaggcaccagcagagagccagtcgtccatcatgggattttgcaggactggaagtccttgagtagttctagttaaagagtctatccgcagaatggctgaaggacttgatgccgttttgagcctaattttctgtaacctcctctgagtgggctgcagcccttggacattagagctcttccactcttgagcttgtcctgtcttctcagtgaattgcagggccaccagctcaggacaatggatcttacaggaattctttttgcctgtcccctacatgcgcctcctcccctgctgttctccctcccacacccctgtcccttctctctcctccttgatgggtccgatgcccctggcctcagcgggaggaaggc

SEQ ID NO: 7393 - DNA, 4895 bp, Homo Sapiens
  XM_930648
gacctcaggtgatctgtctgccttggcctcccaaagtgctgggattacaggcatgagccattttgcctggccaaaattaatactttttatattaaatttacatatatatagatatacgttttttctttttgataccgggtctcacactgtcaccgaggctggagtacagtggcacaacctctgctcactgcagcctccacctgccaggctcaagcaattctcctgcctcagcctcccgagtagctgggattacaggtaagtgccaccacacccagctgatttttgtgttttttgtagagacgaggtttcgccatgtttcccagactgttctcaaactcctgagctcaaagcagtccacccaccttggcctcccagagttctgggattacaggtgtgagccatcttgctcattctagtttaaacttttgagtggtttgtgtctcctgattggactcctacaaatacagaattgatgctaggaagggtaccaggagatagacgcacacagatgggatttgggaataggtttggttatccaaggagcagtgctgagctccttgcaatgggatatgggatgctggtgatttccaggaagtgagctcacaatgactcaagctgccacatactgttgattgtgaaatgccagttgaagcatatgtcctgcgagcttaggggtgctacaagttgaccactgcagcagtaaagatgactctgaagaatggcgtgggatggttcctttcaaatgcacttgagcagcggtctccaaccacagggccacagagctggagctggatctaccatgaaagacttgtgaatccaggaagagagactgactgggcaacatgttattcaggtgggaacatccagttgcaggaaaacaagcttaacacgcccactgattctacattatgggtctccctctgttgtccaaggctggagtgtagtagtgctatcgcagctgactgcagcctcaaccttccaggctgaagcgatcctcccacctcaacctcccacgtggctgagactacaggtgcttgccactatgcccaactaatatttggaattttcgtatacgtggattccagaggggtgacagcgaaacctcctacctcccggcagcctctccaggcccagaactttctccagtcagcctctacagaccaagatcatgactcacaatggcctatttaggcccataccctacgtcacggcagcctccacagatgaggctactgcctcacaacagcctccacaggcacagctccatcgttacaatggcctctttagacccagctcctgcctcccagccttctctccaggccctgaactttctcaagtcgacctcaccaggcccaggtcatgcttctttgcagcctctccaggcccagctcctgcatcttggtggcccctccaggcccagcctctgcctcccgtcagcctctacagtcccaacgtctgcctcacagcagattcttcacgcccagcatctacctcactgtggaccccccaagccaagctcccaacctttcagcagcttctacacacccagctcctgccacccagtggcctctttaggccaagctcatgcttcacaagggcctttccaggcccaacttttgtctcatggcaaccttccctggccagattcctgcctgtctcccagcagcctagacaggcccaggtcttgcctcacactggcctctctacatccagcttatgcctcacggtggcctctccacgcccaactcctgtcccaggacgtcatctccgggcccaaaacttactcaagtcagactctctagtcccaactactgcctcctggtggcctatgaaggcccaaaatctcctcaagttgacctgtccaggcccagctcctgcctcctgtcagcgtctacaggcccaacctctgcctcatgggggcttctccagacccacctcttcctcttggctgggtctacaggcacaactgctgcctcacaacagccttttttggcccagttcctgtccagctcatggcggccaatgtaggcccaaaacttcctcaagtcaaactctccaggcccaccttctgcttcccggtggcatcaacaggcccagctttgacttgagaacagcctctgcaggccctgctcttgcctcccaggggctttttccaggcccagctcttgcctcatggcagctgccccaggccaaatttctgcctgcctgccagcagcctcaacaggcacagctcctccctcacagtggcccatttaggcccaactcatgactgtgaggccatttccaggcctagtgcctgcctcgtggctgactcttgaagcccaaaacttcctcaaatcaggcttttgcccaacttctgtctactgtcggactctacaggtcagcctctgcctcacagtggaccctccagacccagatggtgtctcactgtggcatcctcaggcgaagctcctgccttttggcagcctctccaggcccagctcctcctgcctcccagtggcctctttcggcccagcccagctcatgcctcccggcggccttcccaagccccgcttttgactttcggtggcctctgcaggcctcgacaaggcccagcctcctgcctcccgaaggcctgcacaggcccagcctctgcctcacagcggactctccacgcccagctagctgttgcttcactgcggcctcccgagtccaaagctcctgcctctcggccgcttcggcaggcccagctcccgcctgccagtggcctcttcaggcccatggggctcattcctgacaacggcctttccaggcccagtttttcccttccggcggcctctccgggcccagaacctcctcaagtcggcctctccagacccacttgcaccctccgtgcattctctccgggcccagctcttcttcctggttgggtctccaggcccgattcctgcctctcaacaacctctttggactcagtgcctacccatctcctggcggccttggtcggcccacagcttcctcaagccaagctccccaggcccaggtcaggcctcacggtggcctctccaggatgagctcctgccctccgatggcatctccaggccccaaatggtctccggtcggtgggctcctccacgccaaggttgggcctcccggcgactgccgcaggcccaagttgtcctgaagtcgggctctcccggctgcatctccaggccggactctggcccgactccaggtcccaacaacgtctttggactcagctcctgcccagctcccagcggccctggtaggcccacaacttccctaagccaagctccccaggcccagctcaggcctcgcggtggcctctccaggctcagctcctggccctccgatgacatctgcaggccccaaatggcctccggtcggtgggctcctctaggcccagcttgggcctcccggcggcctccgcaggcccaaatcgtcccgaagtcagtctctccaggcttagctccagcctcccggcggcctctgcaggcccaagtcgtcctcaagtcggcctggaagtgggcctggaagagcagcaagtcggcctccctgggcccagctccgtcctctcgacggcctctccaggtgcaaaacttcctcgagtcagcctctccaggcccagctcctcctgcctcccagtggcctctttcggcccagcccagctcatggctctcggcggccttcccaggccccgcttttgagttttggcagcctcttcaggcgcagaacttgatctccagtcggcctttgcaggcccggcctcctgcctctcgaaggcctgcacgggcccggcctcggcctcggcctcacagcggactctccacgcccagctagctctcgcctcactgcggcctccccagtccaaagctcctgcctttcggccacttcggcaggtccagctcctgcctgccagtggcctctttaggcccagctcattcctcacgtcggccattccaggccccgtttttcccttccggcagcctcttggcctctaatttgtttatcttttgtgtataaatcccaaaatattgaattttggaatatttccaccattatgtaaatgttttggtaggtaatttatttggagtgagtttctgcgccaagcccgaattttttattttattttccttattatttggtgttaaacaggtttaatgacggtcatggcaactttttggcacaatgaaaaatatcgcccacgatcaacgtgttctgttctggggaagggggcaaaggcagggtgaatcactttcttaaaaagtatagctcaagttgggagtgcagagggaatggggagaaaaccctcccgctgcctgtgtcgaagtgcaggagcccccacccccatactcacctgagtccagcccctctggggaaagaaggggtgcatgaactccccctagtccacaggcgcctccctgtggcccaaggccctcttcacactccatcttgtagccccagcaggagctattttccgaaaagtgaaaagctctgaaggtcccacaattcatggtatgtacaggggctcggaggagggaaactgcccagctttcccccggcacagctgcaggggtagggggtatagataagaggagcaggccttggccaggcgtggtggctcacgcctgtaatcccagcactttgggagggggaggcaggcagatcacgatgtcaggagatcgaaatcagcctggccaagatgatgaagccccgtctgtactaaaaatacaaaaattagccggacgtggtagcgtccacctgtaatcctagctacccggaaggctgaggcaggagaatggcgtgaacccggcgggaagaggttgcagtgagccaagatcgcaccactgcactccagcctgggcaacagagcaagactcggtctcaaaaaaaaa

SEQ ID NO: 7394 - DNA, 1159 bp, Homo Sapiens
  XM_930677
tggaatgcctcaccagagcagcgtgtagcagttccctgtggaggattaacacagtggctgaacaccgggaaggaactggcacttggagtccggacatctgaaacttgtagactgggagctgtacatggatgggagcagcttcaccaacccctgcaaagtgactctgaagaagacgacaagccctgctccagtcacacccggaagctgactggtccacgcacagctgaagcatgaggaaactcatcgcgggactaattttccttaaaatttagacttgcacagtaaggacttcaactgaccttcctcagactgagaactgtttccagtatatacatcaagtcactgagagaacatcaccaccctgaagccagagactaacactgcaggactcagcagttgcttccttcagcctaagcacagcagccacagccctttctggctccattgctgtggtgtccctcatcttgctcctggtgggtctcttgtccatgaccctgaagaaatggaggcaagagagactatttaagaaacaactgaggcatcagaccaactttccccacaagtcctcggatctttcctgccatgctgatgccatatattccaacgtgatcaacctggctccccagaaggaggacgactttgctgtctacaccaacatgcccccttttcatcaccccaggaggacattgccagaccaagtggaatatgtctccattgtattccactgatgggaagctaatgagatgctcagagtgggggtcagacctggccccagctgaatcttggcataccctttgctttagatttatgtgtgtgtttaaaaaaaaaaaaatacataggccaggcacggtggctcacacctgtatcccagcactttgggaggctgaggcaggcagatcaccaggtcaagagatcaagaccatcctggccaacatggtgaaaccccgtctctactaaagatacaaaaattagccaggtgtggtggtgcatgcctgtaatcccagctacttggaaggctgaggcaggagaatcacttgaacccagggggcggaagttgcagtgagccaagatcacaccgctgcactccagcctggcaacagagtgagactccatctctaaaaaaagtaaataaataaaaataaaacgtaaaacatattct

SEQ ID NO: 7395 - DNA, 14246 bp, Homo Sapiens
  XM_930703
tgaaacagatggtcatagaattggttcagtggttgtgagtgcagcaacccaagggtgtcttaatctgaaataccaccaggaatgtctggacacagtagacaaaggtttttcaactggacgccttaggatacatgcttccaaaaacaaagtagccgaaaagaaaccagagtcacagaatatcagagccagaggaacatttggagacggttacctggcacgctggccacaatctacctcactcttatcagagtctgagctactggcagtgctttcagctctgagttgaggcaccttgaaccttgtttttgtggtgaaggatcctaaagtgctgtggggagtgatcacatttttcacaacagtaagtccctgactccacctcttctgccacaaacgtcagcatggtggtatcagccggcccttggtccagcgagaaggcagagatgaacattctagaaatcaacgagaaattgcgcccccagttggcagagaacaaacagcagttcggaaacctcaaagagagatgttttgtaactcaactggccggcttcctggccaaccagcagaagaaatacaactatgaagagtgtaaagacctcataaaatttatgctgaggaatgagcgacagttcaaggaggagaagcttgcagagcagctcaagcaagctgaggagctcaggcaatataaagtcctggttcactctcaggaacgagagctgacccagttaagggagaagttacgggaagggagagatgcctcccgctcattgaatgagcatctccaggccctcctcactctggatgagccggacaagtcccaggggcaggacctccaagaacagctggctgaggggtgtagactggcacagcaccttgtccaaaagctcagcccagaaaatgacgaagatgaggatgaagatgttcaagttgaggaggctgagaaagtgcagaaatcatctgcccccagggaggtgcagaagactgaagagagcaaagtccctgaggactcactggaggaatgtgccatcacttgttcaaatagccacggcccttgtgactccaaccagcctcacaagaacatcaaaatcacatttgaggaagacgaagtcaactcaactctggttgtagacagagaatcctctcatgatgaatgtcaggatgctctaaacattctcccagtccctggccccacctcttctgccacaaacgtcagcatggtggtatcagccggccctttgtccagcgagaaggcagagatgaacattctagaaatcaatgagaaattgcacccccagctggcagagaagaaacagcagttcagaaacctcaaagagagatgttttgtaactcaactggccggcttcctggccaaccagcagaagaaatacaaatatgaagagtgcaaagacctcataaaatctatgctgaggaatgagcgacagttcaaggaggagaagcttgcagagcagctcaagcaagctgaggagctcaggcaatataaagtcctggttcacgctcaggaacgagagctgacccagttaagggagaagttgcgggaagggagagatgcctcccgctcattgaatgagcatctccaggccctccttactccggatgagccggacaagtcccaggggcaggacctccaagaacagctggctgaggggtgtagactggcacagcaccttgtccaaaagctcagcccagaaaatgacaacgatgacgatgaagatgttcaagttgagttggctgagaaagtgcagaaatcgtctgcccccagggagatgcagaaggctgaagaaaaggaagtccctgaggactcacaggaggaatgtgccatcacttattcaaatagccatggcccttatgactccaaccagccacataggaaaaccaaaatcacatttgaggaagacaaagtcgactcaactctgattggctcatcctctcatgttgaatgggaggatgctgtacacattattccagaaaatgaaagtgatgatgaggaagaggaagaaaaagggccagtgtctcccaggaatctgcaggagtctgaagaggaggaagtcccccaggagtcctgggatgaaggttattcgactctctcaattcctcctgaaatgttggcctcgtaccagtcttacagcagcacatttcactcattagaggaacagcaagtctgcatggctgttgacataggcagacatcggtgggatcaagtgaaaaaggaggaccaagaggcaacaggtcccaggctcagcagggagctgctggatgagaaagggcctgaagtcttgcaggactcactggatagatgttattcaactccttcaggttgtcttgaactgactgactcatgccagccctacagaagtgccttttacgtattggagcaacagcgtattggcttggctgttgacatggatgaaattgaaaagtaccaagaagtggaagaagaccaagacccatcatgccccaggctcagcagggagctgctggatgagaaagagcctgaagtcttgcaggactcactggatagatgttattcgactccttcaggttatcttgaactgcctgacttaggccagccctacagcagtgctgtttactcattggaggaacagtaccttggcttggctcttgacgtggacagaactaaaaaggaccaagaagaggaagaagaccaaggcccaccatgccccaggctcagcagggagctgctggaggtagtagagcctgaagtcttgcaggactcactggatagatgttattcaactccttccagttgtcttgaacagcctgactcctgccagccctatggaagttccttttatgcattggaggaaaaacatgttggcttttctcttgacgtgggagaaattgaaaagaaggggaaggggaagaaaagaaggggaagaagatcaaagaaggaaagaagaaggggaagaaaagaaggggaagaagatcaaaacccaccatgccccaggctcagcagggagctgctggatgagaaagggcctgaagtcttgcaggactcactggatagaagttattcaactccttcaggttgtcttgaactgactgactcatgccagccctacagaagtgccttttacgtattggagcaacagcgtgttggcttggctgttgacatggatgaaattgaaaagtaccaagaagtggaagaagaccaagacccatcatgccccaggctcagcagggagctgctggatgagaaagagcctgaagtcttgcaggactcactggatagatgttattcgactccttcaggttatcttgaactgcctgacttaggccagccctacagcagtgctgtttactcattggaggaacagtaccttggcttggctcttgacgtggacagaactaaaaaggaccaagaagaggaagaagaccaaggcccaccatgccccaggctcagcagggagctgctggaggtagtagagcctgaagtcttgcaggactcactggatagatgttattcaactccttccagttgtcttgaacagcctgactcctgccagccctatggaagttccttttatgcattggaggaaaaacatgttggcttttctctcgacgtgggagaaattgaaaagaaggggaaggggaagaaaagaaggggaagaagatcaaagaaggaaagaagaaggggaagaaaagaaggggaagaagatcaaaacccaccatgccccaggctcagcagggagctgctggatgagaaagggcctgaagtcttgcaggactcactggatagatgttattcaactccttcaggttgtcttgaactgactgactcatgccagccctacagaagtgccttttacgtattggagcaacagcgtgttggcttggctgttgacatggatgaaattgaaaagtaccaagaagtggaagaagaccaagacccatcatgccccaggctcagcagggagctgctggatgagaaagagcctgaagtcttgcaggactcactggatagatgttattcgactccttcaggttatcttgaactgcctgacttaggccagccctacagcagtgctgtttactcattggaggaacagtaccttggcttggctcttgacgtggacagaactaaaaaggaccaagaagaggaagaagaccaaggcccaccatgccccaggctcagcagggagctgctggaggtagtagagcctgaagtcttgcaggactcactggatagatgttattcaactccttccagttgtcttgaacagcctgactcctgccagccctatggaagttccttttatgcattggaggaaaaacatgttggcttttctctcgacgtgggagaaattgaaaagaaggggaaggggaagaaaagaaggggaagaagatcaaagaaggaaagaagaaggggaagaaaagaaggggaagaagatcaaaacccaccatgccccaggctcagcagggagctgctggatgagaaagggcctgaagtcttgcaggactcactggatagatgttattcaactccttcaggttgtcttgaactgactgactcatgccagccctacagaagtgccttttacgtattggagcaacagcgtgttggcttggctgttgacatggatgaaattgaaaagtaccaagaagtggaagaagaccaagacccatcatgccccaggctcagcagggagctgctggatgagaaagagcctgaagtcttgcaggactcactggatagatgttattcgactccttcaggttatcttgaactgcctgacttaggccagccctacagcagtgctgtttactcattggaggaacagtaccttggcttggctcttgacgtggacagaactaaaaaggaccaagaagaggaagaagaccaaggcccaccatgccccaggctcagcagggagctgctggaggtagtagagcctgaagtcttgcaggactcactggatagatgttattcaactccttccagttgtcttgaacagcctgactcctgccagccctatggaagttccttttatgcattggaggaaaaacatgttggcttttctctcgacgtgggagaaattgaaaagaaggggaaggggaagaaaagaaggggaagaagatcaaagaaggaaagaagaaggggaagaaaagaaggggaagaagatcaaaacccaccatgccccaggctcagcagggagctgctggatgagaaagggcctgaagtcttgcaggactcactggatagaagttattcaactccttcaggttgtcttgaactgactgactcatgccagccctacagaagtgccttttacgtattggagcaacagcgtgttggcttggctgttgacatggatgaaattgaaaagtaccaagaagtggaagaagaccaagacccatcatgccccaggctcagcagggagctgctggatgagaaagagcctgaagtcttgcaggactcactggatagatgttattcgactccttcaggttatcttgaactgcctgacttaggccagccctacagcagtgctgtttactcattggaggaacagtaccttggcttggctcttgacgtggacagaactaaaaaggaccaagaagaggaagaagaccaaggcccaccatgccccaggctcagcagggagctgctggaggtagtagagcctgaagtcttgcaggactcactggatagatgttattcaactccttccagttgtcttgaacagcctgactcctgccagccctatggaagttccttttatgcattggaggaaaaacatgttggcttttctctcgacgtgggagaaattgaaaagaaggggaaggggaagaaaagaaggggaagaagatcaaagaaggaaagaagaaggggaagaaaagaaggggaagaagatcaaaacccaccatgccccaggctcagcagggagctgctggatgagaaagggcctgaagtcttgcaggactcactggatagaagttattcaactccttcaggttgtcttgaactgactgactcatgccagccctacagaagtgccttttacgtattggagcaacagcgtgttggcttggctgttgacatggatgaaattgaaaagtaccaagaagtggaagaagaccaagacccatcatgccccaggctcagcagggagctgctggatgagaaagagcctgaagtcttgcaggactcactggatagatgttattcgactccttcaggttatcttgaactgcctgacttaggccagccctacagcagtgctgtttactcattggaggaacagtaccttggcttggctcttgacgtggacagaactaaaaaggaccaagaagaggaagaagaccaaggcccaccatgccccaggctcagcagggagctgctggaggtagtagagcctgaagtcttgcaggactcactggatagatgttattcaactccttccagttgtcttgaacagcctgactcctgccagccctatggaagttccttttatgcattggaggaaaaacatgttggcttttctctcgacgtgggagaaattgaaaagaaggggaaggggaagaaaagaaggggaagaagatcaaagaaggaaagaagaaggggaagaaaagaaggggaagaagatcaaaacccaccatgccccaggctcagcagggagctgctggatgagaaagggcctgaagtcttgcaggactcactggatagaagttattcaactccttcaggttgtcttgaactgactgactcatgccagccctacagaagtgccttttacgtattggagcaacagcgtgttggcttggctgttgacatggatgaaattgaaaagtaccaagaagtggaagaagaccaagacccatcatgccccaggctcagcagggagctgctggatgagaaagagcctgaagtcttgcaggactcactggatagatgttattcgactccttcaggttatcttgaactgcctgacttaggccagccctacagcagtgctgtttactcattggaggaacagtaccttggcttggctcttgacgtggacagaactaaaaaggaccaagaagaggaagaagaccaaggcccaccatgccccaggctcagcagggagctgctggaggtagtagagcctgaagtcttgcaggactcactggatagatgttattcaactccttccagttgtcttgaacagcctgactcctgccagccctatggaagttccttttatgcattggaggaaaaacatgttggcttttctctcgacgtgggagaaattgaaaagaaggggaaggggaagaaaagaaggggaagaagatcaaagaaggaaagaagaaggggaagaaaagaaggggaagaagatcaaaacccaccatgccccaggctcagcagggagctgctggatgagaaagggcctgaagtcttgcaggactcactggatagaagttattcaactccttcaggttgtcttgaactgactgactcatgccagccctacagaagtgccttttacgtattggagcaacagcgtgttggcttggctgttgacatggatgaaattgaaaagtaccaagaagtggaagaagaccaagacccatcatgccccaggctcagcagggagctgctggatgagaaagagcctgaagtcttgcaggactcactggatagatgttattcgactccttcaggttatcttgaactgcctgacttaggccagccctacagcagtgctgtttactcattggaggaacagtaccttggcttggctcttgacgtggacagaactaaaaaggaccaagaagaggaagaagaccaaggcccaccatgccccaggctcagcagggagctgctggaggtagtagagcctgaagtcttgcaggactcactggatagatgttattcaactccttccagttgtcttgaacagcctgactcctgccagccctatggaagttccttttatgcattggaggaaaaacatgttggcttttctctcgacgtgggagaaattgaaaagaaggggaaggggaagaaaagaaggggaagaagatcaaagaaggaaagaagaaggggaagaaaagaaggggaagaagatcaaaacccaccatgccccaggctcagcagggagctgctggatgagaaagggcctgaagtcttgcaggactcactggatagatgttattcaactccttcaggttgtcttgaactgactgactcatgccagccctacagaagtgccttttacgtattggagcaacagcgtgttggcttggctgttgacatggatgaaattgaaaagtaccaagaagtggaagaagaccaagacccatcatgccccaggctcagcagggagctgctggatgagaaagagcctgaagtcttgcaggactcactggatagatgttattcgactccttcaggttatcttgaactgcctgacttaggccagccctacagcagtgctgtttactcattggaggaacagtaccttggcttggctcttgacgtggacagaactaaaaaggaccaagaagaggaagaagaccaaggcccaccatgccccaggctcagcagggagctgctggaggtagtagagcctgaagtcttgcaggactcactggatagatgttattcaactccttccagttgtcttgaacagcctgactcctgccagccctatggaagttccttttatgcattggaggaaaaacatgttggcttttctcttgacgtgggagaaattgaaaagaaggggaaggggaagaaaagaaggggaagaagatcaaagaaggaaagaagaaggggaagaaaagaaggggaagaagatcaaaacccaccatgccccaggctcagcagggagctgctggatgagaaagggcctgaagtcttgcaggactcactggatagatgttattcaactccttcaggttgtcttgaactgactgactcatgccagccctacagaagtgccttttacgtattggagcaacagcgtgttggcttggctgttgacatggatgaaattgaaaagtaccaagaagtggaagaagaccaagacccatcatgccccaggctcagcagggagctgctggatgagaaagagcctgaagtcttgcaggactcactggatagatgttattcgactccttcaggttatcttgaactgcctgacttaggccagccctacagcagtgctgtttactcattggaggaacagtaccttggcttggctcttgacgtggacagaactaaaaaggaccaagaagaggaagaagaccaaggcccaccatgccccaggctcagcagggagctgctggaggtagtagagcctgaagtcttgcaggactcactggatagatgttattcaactccttccagttgtcttgaacagcctgactcctgccagccctatggaagttccttttatgcattggaggaaaaacatgttggcttttctcttgacgtgggagaaattgaaaagaaggggaaggggaagaaaagaaggggaagaagatcaaagaaggaaagaagaaggggaagaaaagaaggggaagaagatcaaaacccaccatgccccaggctcagcagggagctgctggatgagaaagggcctgaagtcttgcaggactcactggatagatgttattcaactccttcaggttgtcttgaactgactgactcatgccagccctacagaagtgccttttacgtattggagcaacagcgtgttggcttggctgttgacatggatgaaattgaaaagtaccaagaagtggaagaagaccaagacccatcatgccccaggctcagcagggagctgctggatgagaaagagcctgaagtcttgcaggactcactggatagatgttattcgactccttcaggttatcttgaactgcctgacttaggccagccctacagcagtgctgtttactcattggaggaacagtaccttggcttggctcttgacgtggacagaactaaaaaggaccaagaagaggaagaagaccaaggcccaccatgccccaggctcagcagggagctgctggaggtagtagagcctgaagtcttgcaggactcactggatagatgttattcaactccttccagttgtcttgaacagcctgactcctgccagccctatggaagttccttttatgcattggaggaaaaacatgttggcttttctctcgacgtgggagaaattgaaaagaaggggaaggggaagaaaagaaggggaagaagatcaaagaaggaaagaagaaggggaagaaaagaaggggaagaagatcaaaccccaccatgccccaggctcagcagggagctgctggatgagaaagggcctgaagtcttgcaggactcactggatagatgttattcaactccttcaggttgtcttgaactgactgactcatgccagccctacagaagtgccttttacgtattggagcaacagcgtgttggcttggctgttgacatggatgaaattgaaaagtaccaagaagtggaagaagaccaagacccatcatgccccaggctcagcagggagctgctggatgagaaagagcctgaagtcttgcaggactcactggatagatgttattcgactccttcaggttatcttgaactgcctgacttaggccagccctacagcagtgctgtttactcattggaggaacagtaccttggcttggctcttgacgtggacagaactaaaaaggaccaagaagaggaagaagaccaaggcccaccatgccccaggctcagcagggagctgctggaggtagtagagcctgaagtcttgcaggactcactggatagatgttattcaactccttccagttgtcttgaacagcctgactcctgccagccctatggaagttccttttatgcattggaggaaaaacatgttggcttttctcttgacgtgggagaaattgaaaagaaggggaaggggaagaaaagaaggggaagaagatcaaagaaggaaagaagaaggggaagaaaagaaggggaagaagatcaaaacccaccatgccccaggctcagcagggagctgctggatgagaaagggcctgaagtcttgcaggactcactggatagatgttattcaactccttcaggttgtcttgaactgactgactcatgccagccctacagaagtgccttttacgtattggagcaacagcgtgttggcttggctgttgacatggatgaaattgaaaagtaccaagaagtggaagaagaccaagacccatcatgccccaggctcagcagggagctgctggatgagaaagagcctgaagtcttgcaggactcactggatagatgttattcgactccttcaggttatcttgaactgcctgacttaggccagccctacagcagtgctgtttactcattggaggaacagtaccttggcttggctcttgacgtggacagaactaaaaaggaccaagaagaggaagaagaccaaggcccaccatgccccaggctcagcagggagctgctggaggtagtagagcctgaagtcttgcaggactcactggatagatgttattcaactccttccagttgtcttgaacagcctgactcctgccagccctatggaagttccttttatgcattggaggaaaaacatgttggcttttctcttgacgtgggagaaattgaaaagaaggggaaggggaagaaaagaaggggaagaagatcaaagaagaaaagaagaaggggaagaaaagaaggggaagaagatcaaaacccaccatgccccaggtgactttcagcaattgtggatgcttaattctgtgttaacacctggaggcaacagattcagggaaaccagagtgtgtttgatgtcatgttttcaacgaaggctgaattactcctactgtcattgctgttggttttcattgcagtagatgtttaggtttccatttcttcctccccttatcttttactaacgtgccataggttgaccatacttcaaaagctgtactctcatggccactgcatcgaattttgagcatattttatggaaaactattgagctcactcttttcatgatcacagtttgctgtgtgtcatgaggacactaactcagagtgtcctttgactcccttaccagtatgtcacctgggcaattcactaggtcactttctctctctctctgtctctgtctctctctctctgtctttctctttcattgttttctacctggccctgttctatcccaacatataggcaataaattttttttttacctcattaatggatctatcctttttcttttctaaccacttccttatgtgacttctgaaatctagtggggctctgtggtttctgattttccctggctgcttctttagttttgtctccttttccaggctcaacggcgtgctgatggaagtggaagagcctgaagtcttacaggactcactggatggatgttattctactccgtcaatgtactttgaactacctgactcattccagcactacagaagtgtgttttactcatttgaggaacagcacatcagcttcgccctttacgtggacaataggttttttactttgacggtgacaagtctccacctggtgttccagatgggagtcatattcccacaataaacagcccttactaagccgagagatgtcattcctgcaggcaggacctataggcacgtgaagatttgaatgaaagtacagttccatttggaagcccagacataggatgggtcagtgggcatggctgtattcctattctcaaaccatgccagtggcaacctgtgctcagtctgaagacaatggacccacgttaggtgtgacacgttcacataactgtgcagcacatgccgggagtgatcagtcagacattttaatttgaaccacgtatctctgggtagctacaaaattcctcagggatttcattttgcaggcatgtctctgagcttctatacctgctcaaggtcattgtcatctttgtgtttagctcatccaaaggtgttaccctggtttcaatgaacctaacctcattctttgtgtcttcagtgttggcttgttttagctgatccatctgtaacacaggagggatccttggttgaggattgtatttcagaaccaccaactgctcttgacaattgttaacccgctaggctcctttggttagagaagccacagtccttcagcctccaattggtgtcagtacttaggaagaccacagctagatggacaaacagcattgggaggccttagccctgctcttctcaattccatcctgtagagaacaggagtcaggagccgctggcaggagacagcatgtcacccaggactctgccggtgcagaatatgaacaatgccatgttcttgcagaaaacgcttagcctgagtttcataggaggtaatcaccagacaactgcagaatgtagaacactgagcaggacaactgacctgtctccttcacatagtccatatcaccacaaatcacacaacaaaaaggagaagagatattttgggttcaaaaaacgtaaaaagataatgtagctgcatttctttagttattttgaaccccaaatatttcctcatctttttgttgttgtcatggatggtggtgacatggacttgtttatagaggacaggtcagctgtctggctcaatgatctacattctgaagttgtctgaaaatgtcttcatgattaaattcagcctaaacgttttgccgggaacactgcagagacaatgctgtgagtttccaacctcagcccatctgcgggcagagaaggtctagtttgtccatcaccattatgatatcaggactggttacttggttaaggaggggtctaggagatctgtcccttttagagacaccttacttataatgaagaagtacttgggaaagcggttttcaagagtataaatatcctgtattctaatgatcatcctctaaacattttatcatttattaatcctccctgcctgtgtctattattatattcatatctctacactgcaaattttgggtctcaatttttactgtgcctttgtttttactagtgtctgctgttgcaaaaagaagaagacattctctgcctgagttttaatttttgtccaaagttaattttaatctatacaattaaaaccttttgcctatcactctggacttctggattgttttttacattcagtgttataatatttgattatgctgattggttttggtgggtactgatgcgaattaataaaaacatttcatttc

SEQ ID NO: 7396 - DNA, 3367 bp, Homo Sapiens
  XM_930798
agatggcagcggctgcgcgtgcgttgttgagtgttcgggacgccggcctgcaggcgccatggtcttcctcaccgcgcagctctggctgcggaatcgcgtcaccgaccgctactttcggatccaggaggtgctgaagcacgccaggcacttccggggaaggaaaaatcgctgctacaggttggcggtcagaaccgtgattcgagcctttgtgaaatgcaccaaagcccgatacctgaagaaaaagaacatgaggaccctctggattaatcgaattacagctgctagccaggaacatggactgaagtatccagcgctcattgggaatttagttaaggcacttccaggttggcttaaagggttaccctaggccagcagtcagctcagtcagggtggtgaccaaggaccctgaacaaggtgtttggttccccgggccgacatcaggactggagtccagcctccctgcagattccacaggtgcctccctcacccgtgtccacatttatccttcagcatcctgcctggaagtcctctgctgtgccacccagataggattctcctaggccttccctccccccaggcgagtgtgcagctgggttcttcctgagccagcgccgcaaccacgcggagccggagtgtgtgtctcacactgacagcaggttctgattcattcttttttcagtgccaggtggagctcaacaggaaagtcctagcggatctggccatctacgagccaaagactttcaaatctttggctgccttggccagtaggaggcgacacgaaggatttgctgctgccttgggggatgggaaggaacctgaaggcattttttccagagtggtgcagtaccactgaggactgttgctgtattgattaggaaaagagacagagtaatttgcagtttgtttgatttatacttttgtttatctacaacccaataacagacatgagggatggccctgtctctctgggacagagcctcacagatgatgtccatgttttgtgtgaatgaaactcaaacactcttcagtttttagagtcattttctggtatcgagcgaccacaccgaggagcacaccctgcttccaaggctgctgccttctgcacacagtgggggatccccacccaccctggctcccctcaagggctgcgtgcacagtgcccgctttccagttacctgacccaccctgagtccctattccattttgctcggggctgacctcagacatgccctgtggctcagctctgccactactcagaacaccagcctcagcttccctatgtcccccagattcagcagcccagcagggattgggggaaatgctcccacatcaggtgggtggtggcctggtccctgcagactggactggcttttcagccatctccaggaagcaacacctagcagacaactgtcccttaaccccaagggtgatgcacacttctcccctggtctttctgccccccgatgcccctacatttacacagcagtgcgcagacccttgccgcaacctgcttgtcttgctgaccctgctgtaggagcgcctaaactgagtgcccgtctcccctccaaaggcagctggcttgaatcctgtgggaacgtgcccttcaccctttgccagcagttgctggggagtctttccggcccctttctcagactcaccacctacctccaacctgcgcagaacaatcagcgtcctgaccacttgctagagatggcttcaggccgaccactccatcctcactgcaggccttcattccttctggcttccatcactgcatggccccctaagaggtccccctcctggcccttgtcactgtgcctcatgacagccactacgccctaagcctttggaggccagggacaaagtctcgttcactgtcctttccgctgcatgagtgcagtgtctggccaggtgcacggggcactcagtgcctgtcagcccttggtaaacagtcctggacaacagggtcaaggacagagccctgggcggccacattcggtgcgtgctcctgtgttgtggcaaagctgccttttctgcgtttcatgtcagtgaaggaagacagggatgtggcagagcctgcgggttgctcccatcactcactcggtttgtgccatagtcctcctgttcccaggcggtcccagggcctgcccctgatgggctggaggcaccaccaacctcccactcctctggcagtcacagctcagggaatgggcaagcagcaccaatgagaaaccagctgtgtggtggggtttccagagaagaggaaattccttctttcctggagagcgtgcagctgtaactcacagacgagacatccctgagctaccagcctggggaaagaggacatgagtaaagctgtaaccataccgtgttacccataacaggcggtgaggagagtgggttttggttggcactgtttgagctgcagtatcaagtcatggcagagctagtggacagctgacctgggggtgggggtgaggagcaatggtggcttctgaatttgagcccgtctgagctgggcagtcactggcagctcagtgtgtgaacctgcaaccactcaggcctctgctgcccttccctcttcctgcctcaccgttccctgccccacgcaggcttccccaccatcctcacccgtggtcctgtactagtcctggcaaaggttccggtaactgcagcaacagatacctcctgcccctcctgcacagctgtggtcgatcgcaggacagccgcaggtgatgaaaaaccgtgaacccaggacgggcagggcgtgagacgcccgcgggaggatcagcgatgtcaagacgttacaaacgcacgaaccccctcgccgtctccctggcgtttgtgaggtcctgtccaagctccttcacacgtagatcaccgggcctcgctcccccgactccttccgtgggcctgaaccttgaggtacttaggcctccccacgctggaggggctctgtagggacgtcgaggccacgtttccagtcatccctccacccgtctctccccaggagctgagtgttgaaggcaagactttgcaggagtctggcgttaatacgcatccccaaagtctggagtcgataaggactgaagacacgacgccgacggcggccgggggacaccgagcatgcgcgtctcatccagggggaggccgagcggagcctctgaccctgccccgcgcccagggttcagcagtgggtcgtcccgccccagatcccaccgagatggccccccttgacccacaggcctttcgagacgcgagttccgcgatccggggtctctgtgcgaacgtgggcatcttggaagagtcccacgccgctcggggcgcacaggcaggcgctctcagcacggcacccgcgctccgctag

SEQ ID NO: 7397 - DNA, 7737 bp, Homo Sapiens
  XM_930884
gccaccgcgcccggcctatcatatgaattttgagggaacacaaacatgcagtctgtagcagatggtaataggctgacatattacacttgttgatgtaaatctgataggtttctttctctccaaggacagctttttaaatatttaacagtatcaataatttttcaggttctgtgagaattttataatttataatttgcagacttaacgtataatctattttgtcctaacaattacaaatatattttttatttcagattgtatatattcctaccagatggagataattacagctttaaaaatttttattttttcattttatttcacacattgacattaaatttttatggacacataataactgtacatatatatggggtagaatgtgatgttttaatacatgtactcaatgtgtaatgatcaaatcagggtaatttgcataatgatttttctgtagggagaaaattcaaaatctactcttctggctattttcaaatatataatatgttattgttaactatactcatcctactatgcaataggacaccagaacttattcctgggttctacatccgttaaggcaaccaaggattggaaatattggaaaaaaaaattgcgtctgtactgaacatgtacagacttttttcttgtccttattccttacacaatatagtacaataactatttgcatgacatttacatcggatattatgagtgatctagagttgatatgaagtatatgggaggatgtgcaaaggtgatgtgcaaatactatgtcattttatatcagggacttgagtatcctttgttaccctcaggagatcctgaaaccagtcccccatggatactgagggctgactgtatagtcctatcctcacggaactttcattctaatgggggaagactgactataaacaaaatatatgtaataggtggtggtaagtaccgtggagaagtaacaaatggggcaaagtgagttatacagctccattcttagaaaccttggagtacttttcttagtttatactcgtggtggtttccttttgtctcctttattacatgggactctgacatgtgcccatagctagggtgacagtaggatctacccgatagtagggtggcagtaggatctacccaaaaagcgtcctgctgatacaggaccaaagcatcctgttgttctcgagcctataaaaagagctaatggtgttgcttctcttaactgtggcctcctacactgtgttttggatgattggtgatgtcttggatattctgtttctttggaactttgaatatacaacactttactagggaattagcaatggaagcagagcaaagatgtacagaggaaacaatgcgtaactctgatggaattgaagtcatgaggcagcagagagcttaaattacagctttaaaaatttttattttttagagggaatttacttgggagtaacagcagtaatagttaacggagccagaatgcttgagtcatataattgcaaagcagagttgggagcaacagatgctaaagagtagttgctgtagttcctctttgggtcgtaggagcagttgtcatattactatatagctactgcatgaagaagagttcttagtgaggcctgggtgaacagctcttcttagtattctgtgtgaccccatttgaccttttaacaaatccctaagtaaataaatagcccctcaggaaaactaagtttttctctgctgtttttttgcttgagagagctataactgtaatagacttatatttctgaacattttagtgcttgccaatatttggtaatatttatgtttcctatatttgtaatgaacattcttcttccggtacattttttgttaaattattgtttgatggataaaagttcaccttttattgtataaaattgactgagattaatttatacacattgacaatgggtaaatagaatttttcagattattaaaagctgaaggatgcccacgtaagcaaaaaaaaaaaagaaaaaaccaacaaaaataaacccaaacccctcaaacagtttcgaacacgaaacattcttctgatgccggcatccctgcttgcaggtgtgaagggggcaggaatcagcgaggtgtcctgggctgagtccccggagtgggaagaggtggcaggaaggggatctgaggaggagaacaggggtcctggtggtctgtgcttcttcccagacacgggagctgtagaggagacctctgcagcagatgctaggggggccagtaggcccaggcagtcttgggacttgggtctgtcctgctgtgcatccatagtgggtgctttagaaacgggaggcccacccgaagcccctgttgcaagtgaggacaaagtgtgggaaggccgtgagggtctgcagtccgagatggccttgtcctcaacgtgcagtgcactgttgatgcggggcctagaggcctgggatctggggtagccacccctgggggcgagtgtctgccctggtgctgtacctgccttgttttcacagcggtgacccgaagagacagcctgaggtccgtcctcactcactgtgtttgaggaactgtgggccagctggcagtgggatgaggctggccccctcctccgctttagttcctggaggccttccgtagagctgtgggagctggagctggcatttcgtttgaggcaggatctggtccgggaggtctgggatctctggttatatctcacttctgacctctgggcacgtgctgcagctgtggctgaggccaagaaatgtgaggggcctccatccactgcattgagtagcgaccccgacgtggggttcaatgtggaggggggaagggctgctgcggcagctgcaggagccgaggtgccaggccttgttcttctcatgccggcatccctgcttgcagctgtgaaggtggcaggaatcagcgaggtgacctgggctgagtcccgggagtgggaagaggtggcaggaaggggatctgaggaggagaacaggggtcctggtggtctgtgcttcttcccagacacgggagctgtagaggggacctctgcagcagatgctaggggggccactaggcccaggcagtcttgggacttgggtctgtcctgctgtgcgtccatagtgggtgctttagaaacgggaggcccacccgaagcccctgttgcaagtgaggacaaagtgtgggaaggccgtgagggtctgcagtccgagatggccttgtcctcaacgtacagtgcactgttgatgtggggcctagaggcctgggatctgggggagcctcccctgggggcgagtgtctgccctggtgctgtacctgccttgttttcacagcggtgacccgaagagacagcctgaggtccgtcctcactcactgtgtttgaggaactgtgggccagctggcagtgggatgaggctggccccctcctccgctttagttcctggaggccttccgtagagctgtgggagctggagctggagctggcatttcgtttgaggcaggatctggtccgggaggtctgggatctctggttatatctcacttctgacctctgggcacgtgctgcagctgtggctgaggccaagaaatgtgaggggcctccatccactgcattgagtagtgaccccgacgtgttgttcaatgtggaggggggaggggctgctgtggcagctgcaggagccgaccttgttcttctcatgccggcatccctgcttgcagctgtgaaggtggcaggaatcagcgaggtgacctgtgctgtgtcccgggagtggtaagaggtggcaggaaggggatctgaggaggagaacaggggtcctggtggtctgtgcttcttcccagacacgggagctgtagaggggacctctgcagcagatgctaggggggccagtaggcccagggagtcttgggacttgggtctgtcctgctgtgcatccatagtgggtgctttagaaacgggaggcccacccgaagcccctgttgcaagtgaggacaaagtgtgggaaggccgtgagggtctgcagtccgagatggccttgtcctcaacgtgcagtgcagtgttgatgtggggcctagaggcctgggatctgggggagccacccctgggggcaagtgtctgccctggtgctgtacctgccttgttttcacagcggtgacccgaagagacagcctgaggtccgtcctcactcactgtgtttgaggaactgagggccagctggcagtgggatgaggctggccccctcctccgctttacttcctggaggccttccgtagagctgtgggagctggagctggcatttcgtttgaggcaggatctggtccgggaggtctgggatctctggttatatctcacttctgacctctgggcacgtgctgcagctgtggctgaggccaagaaatgtgaggggcctccatccactgcattgagtagtgaccccgacgtggggttcaatgtggaggggggaggggctgctgcggcagctgcaggagccgaccttgttcttctcatgccggcatccctgcttgcagctgtgaagggggcaggaatcatcgaggtgacctgggctgagtcccgggagtgggaagagttggcaggaaggggatctgaggaggagaacaggggtcctggtggtctgtgcttcttcccagacacgggagctgtagcggggacctctgcagcagatgctaggggggccactaggcccaggcagtcttgggacttgggtctgtcctgctgtgcatccatagtgggtgctttagaaacgggaggcccacccgaagcccctgttgcaagtgaggacaaagtgtgggaaggccgtgagggtctgcagtccgggatggccttgtcctcaacgtgcagtgcactgttgatgcgctggaatgccgtctctttttccaggtgcaggtcttcagccgtgacccggtaccccagctctaagggaggtggcagcatcaaaggctcccctcgcctgcgtggcagcaggggaatcttgcgtctacggggcctagagtcctgggatctgggggagccacccgttggggcgattgtctgccctggtgctgtatctgcccccttttcacaccgtgtgtgacccgaagagacagcctgaggcctgtcctcactcactgtctttgagtaactgagggtcagctggcagcgggatgaggctggccccctcctctgctttagccccggcaagcctcccgtggagctgtaggagctggagatggcatttcgtttggtgctcgagctcgtccaggatgtctgggatgtgtggttatatctgatttctgagctctgggcgtggaggtctgtctgcagaggcccgggcctgggcacaaagggagaggggcctccattgtcccgcaggggccaaaatgcagaccgtgcatccccggtgacctcggggaccgttctctgatcatcaggattttcttggactctggggtccttgtcctgctcaggcatccctgccccgctctccttgagggccctcaacactatcttccctggacacaagtctggggacagccgggtgttgtggaccccaaaggggtgactacctgctcctgggccccacagagtccttgtgctcagtgtagtggctgagctgggggatgccctggaactcggagcacacagcactggcttactgtggtacctgtgcagtgaaattgaagacagaatcaccaggatggaacacaggtcttgcaggatcacggaaaaccttcttagagttgtcttgacaccagtgatgtcgagtgtgcgggtgtttgtaggatggcctgccactcagtccaggggcaggagcaacggggagatcccacaagcaaagtgaactgggggatgggctgaaggggctccaggcaactgagccctactcgcaggtcctcggccttggcccaaacaggaatgaggggcacagagtgcccgggtaaccgctcctgggagcagtggggaactgtcggatacttgaactctcaagagctgggctctgagcgtcctcgtccagctgccaacttggccaaaggctaagccagcagattgttctgttgccgggcaacgcgacttctaaacctgagggagtgggcatgtgagcacataatggcaccagtgacagagcgaccataatggatgaataagcgcagccagggctggtgaattaccagatctccgtcaagtgcagtaaccagttcaagttggaagtgtgtcttttgaatgcagaaaacaaagtcgtggacaaccaggctgggacccagggccagctgaaggtgctgggtgccaacctctggtggccgtacctgatgcacgaacaccccgcctccctgtactcgtgggaggatggtgattgctcacaccaaagccttggacccctcccagcctgtgacctttgtgaccaactccacctacgcagcagacaagggggctctgtatgtggatgtgatccgtgtgaacagctactactcttggtatcgcaactacgggcacctggagttgattcagctgcagctggccgcccagtttgagaattggtgtaagacatcacaatcccattattcagagcgcgtatggagtggaaacgcttgtaaggcttcaccaggatccacctctgatgttcagtgaagaggaccggaaaagtctgctagagcagtaccatctgggtctggatcaaaaacgcagaaaatacgtggttggagagctcatctggaattttgccgatttcatgactaaccagtccaaggatgaaggaaaaactggacctcattatggatttacttttgggatacactcattattccagaggagggtaaaaggctgagaagcttaagatggagctggcttgaaatcctcttgtttatggcagtacatatcggttatgattcaaaaaatatagcccatttccaaaaacctgcaacaaagagatactttctcaggtgtcagtttcttggtcgggaatgaaaatagtgccaacctgtgataccttcactctaattttactttctgaggaagttttctgtaatagttatttggtgataattattaatactggtgagaaaatcaatgtaaaagaggagaaataacccacacaaccacatacaactaggaaatgatagatggatctgaaaaaaaggatatgcactcttaacaagttcaacacccaagtactattgcaagtaccagctgtatttcatggaaaaaaaaaaaagaataactcaaaaggcagaacgaagagcctagaggtcagagatgagaggcatgaataattattcacaggcgttgaatataatcaaatgacttgcaacatttaccactgggattttaaaatgtggtggaccaatcattcttttagtctgtgcattttcccatttttttcaacaggaatgtctagagacattattcctgttttgccactgtatttttggtgaatgtgtagtaagtaactggcctctttagtatcacaaagctggatgaagaaaatgtggtacatatacaccatgaaatactatgccgccacaaaaaggaaatgagatcatgtcctctgcagggacatggatgaagctggaagccattatccttagcaaagtaacgcaggaacagaaaaccaaacaccacatgttgtctcttagaagtgggagctgaacgtacctaattcttgcaattcagtgtatttcctggcgagaggcagagatgaacaaccctggacagttaccacatatggctcttatgaggtaatgaggatggttgtgatgaga

SEQ ID NO: 7398 - DNA, 1522 bp, Homo Sapiens
  XM_931112
ctgccagcagccaggagccaggagccaagagcagagcgccagcatgaacttgggggtcagcatgctgaggatcctcttcctcctggatgtaggaggagctcaagtgctggcaacaggcaagacccctggggctgaaattgatttcaagtacgccctcatcgggactgctgtgggtgtcgccatatctgctggcttcctggccctgaagatctgcatgatcaggaggcacttatttgacgacgactcttccgacctgaaaagcacgcctgggggcctcagtgacaccatcccgctaaagaagagagccccaaggcgaaaccacaatttctccaaaagagatgcacaggtgattgagctgtaggtgagcagtgacgtgaagaggggttctagccccgtggaaaacagcccatggttaacatctcaggatgttctgcattcaaacacccaaggctggtaatgaactttcacatggactgaatattggaggcaaataatagaaggaatagaatatacagtgcctctgtcctgaaggaaaatatcatgcctcttctggaagaaacggactgcacagaggaaggattgagcaatttagcctgcagtggaagaaggtggacaccaaaagcttcaccctgtgttggagctgttcatgcttccatgaggccatggtgtccatgtccgtggaacctaccacagaaaatggctcatgaaaaggggaatccgacccaacacacagcttcctacacactgccatcttatcaacagttaggcactactttgtagaacgattagcttcaccctcttagctgccaggagatcccttcttaaagatggactatgtgaagattcgggagtcctgaaacatggggactccgggatggtctctagccctatcgatgatgaacactggccttctggaggggaaatggcagtctgggctggcgtggtaggaagggctttggtgttcatggaatgggcctgctgctctcagaccttcaaaggatggaaccaacgaaggaccaaatgagaaagcagatgctgtgccttgcagagggccatgaatgtcagttattatttttctccttatacaattattttgtggttattattacaatgtacatggctgttgcatagaagacatgactggtggaggctgaggaaagccatgacattctacaattgccatcaggctaaggccccgtgagcatttctctcccttgtaatattaaccctgtatttctgggatcacatcacggaatattctttgcctttccactttccaggaaatctctcggactgggctaccctccttgtgtgtgatgaaagatgagctatatttcagaacaaagtgctgtgttgtcatgatttgcctggactcccagggcgtctcttacccaacttgataacgatgctgttcattagcagcctttgttaactgataaccaagagcggtaatgtgatactcataagcaattttctgtgtgtaggataaaataaaccatcttgtatgggatctgctaattga

SEQ ID NO: 7399 - DNA, 3526 bp, Homo Sapiens
  XM_931359
atgcgcacagagaccaacctggctggtgaccgcggcgcagaaccaggggtcgctaaccagcttagccacaggattctcccgcaggatgggataaagagagcacagcccccaccccacacccctgccactggaacgcggtcctcctacagactccttcctcaaaaagggagaggcaacctgcgaggggccccgaccgcccccgtcagcttctcccgaatccggcgcaacccgctgcgcacccagctatcaggatccccgccgcgacgcccgacctccgtgctccgcctggcctcccccgcaggtgacctgccccgccgcccccggccgcgggcgggcggcggccgccactcacctcgcccggcagtgggaaccattttccgagggggaaggaaaggcaggctgcgggagggtcgcggggcgttaaggggcagcgggaaacgcagaggatgggggctccgtcctcagcgcgtccgcagccggctcgcagggctcggggcgccacgcggaggtgcagctgcacctcggggatggggcggccaaggagccgagaggctcggcgtccaccagccggggctccctactcacgctgcactgcgaggaggcggcggcggcagcgaaggaggaggaggcggcgcccggccgtccccgcccagagcccggcagccaccgagtggccgcccgcgtccccgcaggacccgcctcctcggctccgcagagcggcacacagggcgcgccgcgctcgctcggcacgggcagctcagccggcctcacgccgccgtccgcaacagcagccgcgggcggggtgcagccacctccgtgagcgccgcagcccgccccactcggggcggggcccgcgggcaccggagagcggacggccgagcacgagggggctgcgcgcagctccgggcagggaccccgtctgcaccgggtggcctgcaagattgccggggtaggcagggggaggagaacgctcacccgttccggtctggcgctcccttttctccacacccacacgcctcccgctccacgctggcggcgcagctgctcccgctgccacagccgccaccgccgccgaagctcgcgccgccgccgctgccgccttggctgagcgcggtcacgtgacgcgatccgcggggagcctgggggcgggcgagtgcgcgcgcgcgcgcgcggaggaaccgcggctcggaccgggactgggagctgagcggcactgggagggcgtttaaggggaggacccggcgagcgcgccctcggctggcgagcgcgcgcctggcgattagaacttgccgcgcggtcgggaaagggtggccggagtgaggggcggaggtggggacttgcgcctccgcacgcccctccctttcttccttcccctgagcgccttggcttgccgctgcccccgccccctccagcgcgccccttccctcctgccgcagcctgcgattggctgagaggctctgacgtccgtgtttccatgacgtgttggtgcaggagggagcggcgggggaggagggggtggccaggcgcgcggggaggtgactccgtcagtcacagctgctgtttcggcgcggggccgggccgctgccgcgacgtgtggaggcaggagagcgatgattgccgcaggagaagtgcgggcgcccttcacctggggcccctcccgaaccgcccccgggcccatgcccctccagggcccaggagcgagccagcgggagggcgagggcgagcgctcctggcgaggacagattaaggcgaacccccagtcagcggacatttgagcggctcctcgccgcgtctctgcccccactccaaaccggactcgacgcctgtcccgggccgtgacgcacgcaccggaggaaaaagtgcttctcggctcgctccctctttggggaagagagctcactccccatgcgggcgcgggacactccatctctgttcctgccggtcgggtccgcaaacaccggggatcccagctgcggcgcccaaagggttaacgcaggcgttcggccagtgcaaaccggcctcgcaggatccgcgcttaaaatccgggtgttttcattttgggtttgtttcttctactatgccaagctggtggctctcttttaattctcttgtaacatctcaaccctgcacccatctttcctgaggggaaaaggaaacgggataacttgcggtatttcgatgctcaaaggtaaccggcggctctgctccaaccttcaagagattttgcaagttgaaaaaaaaaaaaaaaccatccttcgtaacatctacttaaaaaaaaaaaagcaagttttccttcttgtacacgcatatacacagtaaagatgtgtatcttacctaagataccgcgcttcatcttcatctaatctttatttgaactcaccgtcgccactggcccagagaccttgtcagtgttattttcagtatcagttaatcagaacaaaaagataagttctgcaatcttctttctcttaattccagaactggaaaattaatatttatatagcctcctcaaaagcatacaggcaataggaagtatggtattatgttcacgatctgatgatagcatttgttttaaaatattttaaaagattagacacaaaatgtgtaaaagacgtttaaaagtgaataaatataaatcaatgctgttgcaaataatttttttatcagtttatgtatctcactaggcttgacattaccagccttctgagctgtgcccttgatgtgtaagataaacgaacattgaacagaatgatagcatttttcctctcttcagtcactgatggagaattggttaatgtggtacaataaatagcccttcctgacactatttcaaatctttttaacagaagaataacctaaatttcacctaataaatttcaatattatttccccctaaaatatctttcaaaacgactcagagacatttaagaatcactggcttttttccaacttttcctccaaggaagttacaatacaatgttgaattatgtattctactttaatcaagaatttgacattaaagtaatatgtgaatcattgctatagtacactagcaaaatgggtaataaactagaatctgttcactttgtgggtttgttccagttccagattataaaatgaatgctcttaaagtgttgtggtcatgaaacaattattgagcatctttatttaagaacacgattcaattaagttttcatttatatcgataaatctataaatgaaacatacggaatatatatattcatgtatatccataaatgaaaacgtgtgtgtgtgtgtatcccggaacatatttgtatgcattttaatgaaatgtgagtcatatgcaatgacaaacttttactgtcatagtcaagaaaattgtactgtagtttggtttttatatttttattcttcaaataggaaataaagggtgaaagcaatatagaaataactgttcacattacattaagaaattcaatttttttctcccacaggcttagtactaaagcatccctcacacatatttttcaatgtaaaaatcaag

SEQ ID NO: 7400 - DNA, 2202 bp, Homo Sapiens
  XM_931434
ttgtctcttaagtggggtcggaataaggttgtggctaggaagatcctgacaacccagggccagtgagtgtctcggaagcctgtgaggggcggagacccggcccggggaggtggagaagctcgccggccgcggaagactaggggtgaggctgctgcgaggaagacccggtcagctgtcccttcccccatcggtcctcttaggggaagtggagatgtgggcctcggagctgcgtggcccgggctgtgcggattccctaaacgccgcacttgcgcacagccccttacgtaaccgtcagtgccggggattccctggagggggtcattctattcaaccattatacacaccccgggctcctgccgccgcgccgccgccgcctcacaaaatggcggcgcccatagaggagaccgcggccgcctccccggccccattttgtgggaggcgagagatctgtcaacatggaaaacctctgctgaggatgcatccgagtttggaaaccccacttaagggatggagcctgggggatcacattaaacggaaaatgccaacgacttctaccacctctacgcgtttttagtttttcattttctcgaaggaagcgccagaagcctgtggagtaattgtaactagagggagaacggaaagctgaggtgactgctccggggacttggcgcggcgccttggtggctttggttgctcttccacgctcccggcagctgaccagaatctcttggagggtctcctgggccacctcggccgcgccagtcgtgcagtgagacttctgtagttttaaaatgccacagtccacggcccggtcggcaccgctcgcctgaatcgtgggctttgggaaccttggaggctgctgctccaggaactcgcggtcggccgggagccggggagcttcgttgctgggagcgggcggtattcgcggactccggcggccctggcgggtcgcggccgggatccgagccggggatgacgatgctgatggagctgatggggcaagagtgggaacggaggcacgtacactgaaatttaagtcatccaagttgggacttaagatagcaggttaatattgtctcaggcgagacttagaacgtcttttctggtatcccagtctgcagtgggcaaatctattgtctttatttctcatttaagggcagaatggagggatgacatatttttacttttcaagaggcggttgccacttttaagtcactgttgtgtgtgtgtgtgtacatacacaaacatacgatagtgtgttttcagagcaagtatcaaaggctaaagacttggagtgatactagtgtttaaaagcctttttaaaaaaattaagatgtgatgagaaactggagaattgacttttaaaaatttcttttctgtagaagaggctatcttcaaaatggagtcctaaagtatatctgatggatagaatttaaattcttaacactgtatataccctgtggtcaaaagcatcaacgtaaaacttgatgtttatcagattacttatgtttcaattttcctgtggttagaaaaattaagacagaagtaagctattaacggtatttgcttgtaagagtaacgttaaaggtttaaggaaaggtttgttgaaatcgatatgcatcacacgaatcatttattttcaatgttgttttccagttgcagcaatcatttgtgtttacatgactttgaaaaagggtttagtttatgttgattttgaccctcttatttaatctctagtgcagaagtgcagctttctgcaggctgcgcctcaatcgctaagttccactctccatcctctgccgcgctactcctggcatgtggatcaccaagatacaatttctggtcctgtctgttcttattgatgtcctttacagttaataaatttgattgccactaatcagtctgtatctcttgcaaaaacaccacatttagcatccaagtagagtcagagtatgttttttatgagattgtactaaagtaaccttctattacatttcttattaccatattgcatttcctatagtgggcagcatagagcaggtggatcctgacaaagtaatgttagagatgtgctgacagctttacaatagatattctccaactaatttgacaagatataaaataaaatgtagttcgtagttttcaagcattaatggaaagtgttcctattaaaaaattaccaataacagtggaaattgttgc

SEQ ID NO: 7401 - DNA, 572 bp, Homo Sapiens
  XM_931493
gggactggcgctggagcccagcgtgggatgaccgtgccccgaaaacatgccagtgaatggaaagaagccaaggtcccctccctccctgcttataccctcaactttgccaatgaggaccctaaataccagctgcactacaggggatgtaactacatacaccgtcaccaaagttgcagcctggccaagaaatgccaggggacgtcgcggcgattgcagactccgcggtgactgtgtagatacgtccagaattcgcccttgtagcgcggggagaggcgagagtgaaggcctagaaaaaaagaagaataaatgggacattacacaagatcaactgcaagaacaaaccagcaatcctgagaggaaccacagaccctctgaaagaagtggactgcttctgcaggacctgggagacaccccaaatactatgaggtttcatgtgctgcccaggatgagccactgtgcccggccaaatgagctatttatgatgatcataaggacacaagataaggaaatccaatcagttgctacgtgctgatgattctgattctggccctgcagtatcgcttgcatgcacc

SEQ ID NO: 7402 - DNA, 3728 bp, Homo Sapiens
  XM_931499
gcggggtagggccgggccgagagaaaccactggggagggtctggggtcggggctttgccatcagtggtgtgaggagcaggccggggcagtgggcaattgagcgaggaacagctgcgggaggactccgcggactcctgagaaccagcttaggggagcggcggcttggggaggtgtagggtggaatcacgagaaagctctgtgggagggcctggtgcacagctcagctgcagggtggagctgagggaaagccgggcgttcctggaggaggagcagggcgaggctgtggcaaagcgctgtgggagcagatggggcggggctgcgggaaagagctggagaaggaggagccaagctgcaccaaggctggcgggcaagagtccaaactttcccgcggcgacctaactgcacctccagtgtcttcccccagagggcacagaagcagcaagaagggcgggaacacttgactggggtccatgcagctctaggctgagtcttgcagggctgagccccccaggcctgctctcctgtgtcctggccgctccgtcagtgcctgccagtggggtccagagggaccgtttttttaacgcctcttttgcagtgagatgcgcctacttctccctggagaagcttgaggaagcagaaatgctggagatgagctgctcctcactctcactcctgggtgtgctgggcagtggggtgcaatgtgcacgtaggtgcacactctccctgggcggcagcgagcagcagaggtctgatctgtggtcggatgacgagaggaagtgcaagtaaagcagctgcagcgagacctcgtccgcacaggggcttgttcttctgtgtctttgcagggctgttttggactcagtattcacctaagcactccaaattacccagcacaccctgcctgcatggcgctgcgctgcaccttcactctggtcacgggtctggcagtcagctcaccaattcctcctgcttccctgggacttgccggcttttagcactgcaattcactcagcaaactgggactgttggtcaccctacctggcagccagtgataaggtgagggccactcctgggagggaggacacctgtggggaaaattcttgtgttatttatttctccttcgggatagggtgcctgcagcgcttcatgggagggggtgggctgatgctgcgggctcagaagtttcaagggcatctggggagaccagatattcagagaccttctagatgtgcctgttccatgtatcagggacgcaggttttcccaacagggctggtgtcattggcatgacagacctgccttggctgagcgttcacctgtctttggagttcagccaccttagcaagtcctgggtttgttcttcagactttgctgctcgcccattgcctggatcgggggctactttgtaaaccaccaggaagactccagtgtttctggttaatttttagatgtttgttaattgctcttggtctctcattaatcccctgtgggtcatccaggaaacatactcaccactgtctgttctctgagttttcatttccaggcatccgccctgcctggatctcctcacctgccaggaacttcctctccacaagccggccatcccagcaaaagttctaacaccaaaggtctggcaactagcctgccatcttgtgcctggagccgcctgcgtgccacctactcccgaagatgggaaccttgttgccagttgggcagatgcggggcaatcctgtaccaagaccccattttaccacctgctttctcagaccactctggaacccactgtctcagattgtgtcctccaggaagcagaccatgagagggagttggcagggccaaagatttactggggctaactaacactcaggaaagggataggaaggaaacagggctggagagcaggttgagcccgacctgacagtctcgagcagcccaacagggaggtgtggagcaagggttgcccactagaggggcctgcattgggtacgggtgatggggtccacatggtacctggcatatagcaggctgtgcaatccatattaactgactggataaattaatgcccagaaaaggtgccctggagaatgggtgtgtgctgaacacaatagggaagggcccagcatctgccttggcataggcagaactgtgctgtgccctgcaacaggccacctgagagctgctttgatcttgtgtgtacattagatgactgccaggggcatgaaggggatgtgcttccagggcatttgctggcagggcgtctcgtgatctcttggtattggtgtgagcacagcctggcaggagagggcagatctccatgcaaagtatgtcagaaagcagatggaagccaggccccctcctgaaagaggctccttgaaggctcctgggaccacattatcattctcttcactcgagagatgaggacactgaaattcagagaggggaagtgatttgcctcagcttgtactaaagaaacatttcaacagagaacccagtggaaattatgacatgttatcttctcagagtcctgaactcccatccctacctcagaagagactcctctgttcacagaagctaaaggcagttccttcccaatggcaactatgtttggatgttggatctacactttctcaagcactgtgatcttcaaatcaaaggagatttctcccattatatacttcttatgatcaacaaattccatcatctccccactaagagaaagtactccaagatgatagaatgattttaaagttatgggactacaacagcagccacaggaaccttgaactgccatccagggccatgcagcaaacaagcaacagggaaatatcccactatgcaatcctattttgagatgatatttaggatgagagaacatgcattagttacctaccagcttgacaggaatggatttccaaatctgacacaccatagcctgaattctcaccagtttgctcctggaaaggcccgctcatgcatgagcccctgccactcttctaaataagcttccaggcattacctgcatgctgtgttcctgtggtgggatggcagtaatctctgctaagataaacgggagcttctgtggataaagcataaacgcagtgaagtgtgtgtggctggaagatttaatgcctctacagtgcttagatacaagttgagcttggaattccagaggtagagcactgctgattggagacatattaagtaaaatgtactgtggaaatgagataaaacctttattcttgctaatgattgtcattgtatgtattcaggtgtccaacaaaggattttagaataaagtgtgcctttaaagtttcccaccttcttaaagctcccaatgaattgcaaagggcctgtttggaatggactgtattaaatctacttcaaatgaaaacctttacactgagtgaaatatggttcaacaattcttaacacaaggcctttacacttgtgtagcccattttggtttggcctatcttgtcactagaatgctgtctgagcttggattatttatgccctaagatttacttaaaattgaagggagtatttccattcatcaacactagttttgatagatgcttaaaaggtgcagtgaggttgatgatcctgaatacacaaattattgatcaccacatcaagttggatttccctaaagatgtatggctttctgaccttgtgatttacactaatgattatgtcttaataaaagtaataaagctaaatactttatacgtg

SEQ ID NO: 7403 - DNA, 1527 bp, Homo Sapiens
  XM_931833
atgcgcagcggcgggggttgttccggctgcctttcactgaggggacccgccagtttcaaactcagtggcgtttgccctgattcccggggcctggctttcagcgtagcaattctgccggcgaagaaggaagacttcatggcagagctgtaccgggttttggaggctggcaagattgggatatttgagagtccaactggcactgggaagtccttaagtcttatttgtggggccctctcttggctccgtgactttgaacagaagaagcgtgaagaagaggcacgactccttgaaactggaactggccccttacatgatgagaaagatgaatccctgtgtctgtcttcttcctgcgaaggggctgcaggcaccccgaggcctgctggagaaccggcctgggttactcagtttgtgcagaagaaagaagagagggacctggtggaccgactaaaggcggagcaggccaggaggaagcagcgagaagaacgcctgcagcagctgcagcacagggtgcagctcaagtatgcagccaagcgcctgaggcaggaagaagaagaaagagagaatctcctccgcctcagcagggagatgctagagacaggcccggaggctgagcggctggagcagctggagtctggggaggaggagctggtcctcgccgaatacgagagtgatgaggagaaaaaggtggcgagcagagtggatgaggatgaggatgacctggaggaagaacacataactaagatttattactgtagtcggacacactcccagctggcccagtttgtgcatgaggtgaagaagagcccctttggcaaggatgttcggctggtctcccttggctcccggcagaacctttgtgtaaatgaagacgtgaaaagcctaggttctgtgcagcttatcaacgaccgctgcgtggacatgcagagaagcaggcacgagaagaagaaaggagctgaggaggagaagccaaagaggaggaggcaggagaagcaggcagcctgccccttctacaaccacgagcagatgggccttctccgggatgaggccctggcagaggtgaaggacatggagcagctgctggcccttgggaaggaggcccgggcctgtccctattacgggagccgccttgccatccctgcagcccagctggtggtgctgccctatcagatgctgctgcatgcggccactcggcaggccgcgggcatccggctgcaggaccaggtggtgatcatcgacgaggcgcacaacctgatcgacaccatcacgggcatgcacagcgtggaggtcagcggctcccagctctgccaggcccattcccagctgctgcagtacgtggagcgatacgggaagcgtttgaaggccaagaacctgatgtacctgaagcagatcctgtatttgctggagaaattcgtggctgtgctagggggtgagagcctcgtccccctgctgaccccgggcctgcaaaactcgctgggctgctttttccttggatgcccatcaggacacctcagttctctgtgtttttaa

SEQ ID NO: 7404 - DNA, 1379 bp, Homo Sapiens
  XM_931870
gcgagcgctggctgacattttcctgcccggaaggatgcatggcccggggtctcctgcacctgagggtgggcgggaggcggccccgcgggttgtgttgctggaaaaaggggtctcgatccagaccccaagagagggttcttgggtctacttcagggaagaattggaggcgagtcacagagcgcagtgaaggaagcaagtttattggaatctactccgttagagagtgcaagtcctcagactgcaggaggaggaactcccgtccttcggtagtgtcactacttagaggcagctgtgaggagctgtgattaatcgtggaatgtgctgatgtgcccactaaagatgcctggtaagcagtggctcctctaacaagtgggcagcttggaactgggaacgagagagccaccgaaacagaatgagggagacaaagaagtgggcatcacccttaactccacaagggcttcccaagggcgctgtaccgtacgcaggcccaggacgaactttatttctcgccccagcatcgctgtccttgtcggtgagaccctggctttagggcagacaggaccacgtttcataagttcatgctgtcccagcagaggaataacgccagaaagtgttccagtacaaccagagaaagagagtccatgagaaatctgcccttgtgaagttggaatcccctcaacctcaccccgctgacttgaatgaagcgactgagacgggctatgatggagcagatccggttgctcgaccttctcccttgcaccaacacatgtagttaatagttactggacatgcatattcagtgggttccaggtaccaaacttgtattgaatggtatgtgccagacaccgtcttgagatctggagaataaaaaaataaaaaaataaaaacgagacatccagagcacagtagccttgcggtcttcctggaactagagaaaattcagcccttctgctccttgggaagctatgtttgggaaaaaaaaaaaaagagagagagagagactccaaagagtttgttattaaatttaagttcaaactaggtgtatatagtacaaaagttcttaccatgcatttaatcttaaaatgtgctgatatctagaaccctaaaaccctgcacttttttattgcctcttacattattattttggtcatgtatgaaatatatcaggcatctctcggtacaggtgaaatgctacatgttctaaactaaggaataagtgcattattataatgtcttccttggccaaactgtataaatccccccctccgcccgccccggccaacatcccttccctgcttttttttttctttctttcctagtgcttaccttcacctaaaatgtcctatatttttactttttttttctggttattttctttc

SEQ ID NO: 7405 - DNA, 2620 bp, Homo Sapiens
  XM_932044
caaagtgctgggattacaggcgtgagccaccatgcccagccaaatctagggctggaacatggctgcagcatataaaaagaattgaattccatacttttgttaaccctgttttttgtttgtttgtagttgttgctgtttttgagacagagtctcgctctgtcgcctaggctggagtgcagtggtgcaatctcggctcactgcagactctgcctcccgggttcaaactattctcctgcctcagcctcccaagtaggtgggactacaggtgcccaccaccacacccggctaatttttgtattttattagagacagggtttcaccatattggccaggctggtctggaactcctgaccttgtgatccgcccacctcggcctcccaaagtggtgggattacaggtgtgagccaccacacccagcccctgttttcttttgttttgcttgcttcttagggttgtttttctatttatggtaaaggcattggctttccatttgtagcatcaatagaatatttcctgtttacaataaccttatgtcatagtaaatggtaaagggatttaaagcagtgcttttcagctgccagaggcctgagagagtttgggcacactctgtgtgatcgggcagaaggcctgtgggaagtttagctgaggacagggccaggaaaggtgatggacagtgggggtctgtcctggtcaccaggcccctgggtcctgcccacctgcttggagctccccacccatcacacatgatgctgccaagccctctgggtattgtgggcaaataccttaggagagaagctgatgagctttgtttcttgaaatgcacagattccttggacatccctgagaggccagtcatgaaagtcagcttggttttctccccctcatttgggttcagaatttaaagtccacacacacgggcagtaagataatatagataaggacatcatcactcggtttcggatgttaaaatgtctaggtgggttaggggtgatttgagatcacgcaaccttgtgccacaaagaggaattcccaggccagagggagacattttattgccatgttatgatctcatcattgagttgaaaggcaatcttgtttcattttggattctttcttatgtttatgtcttataagggcactttgaatttccaagcaaataataattttgaattagcttttaatcattgacttctagcacagttttatgatcagaaacatgctgtgtgatttgattgctctcaaatatattgagatttgctggaacaaaataagtcaggttaatttttgtaaatgtaccatgcatgcttaaaatgaatgtatgtacatttgttcctgagatacaggttgatggacggatggctacatggttgtgatggagatggtttactatcgggaccttccgcatcctgctgatgttttgttgcttaggatatgaatggctgagcggaggctgtaaaacctggcactctgcttgggtatgaggttcttcctgccatcctgccatcatttgttttttatgttttgtcgccaaaagtgaccttgaggaaccctgggagctcaggaaggaaggagcgcccagaagcagggacagggagctggttggggaggaccagaaatcagtagagactgggtttcaccatgttcgccaggatagtctccatgtcttgacctcgtgatccgcctgcctcagcctcccagtgctgggattacaggcgtgagccaccgcgcctggccaaaatatataaccttaagtgttatcaatactctggctgaccatcgtcatcgtgggactgactttggtggaagtccttggttacttatcattactgtgtttctgagaagttataaatttgccatctccctctgcacaagttacctttgtgtgtctttcctgaagactatcttcccgtctcaaaatggacatgatggatccacggatgtacagcagagagccaggaggtccaactgccgtagacaggaaggaattaaaattgtcctggaagacatctttactttatggagacaggtggaaaccaaagttcgagctaaaatccgtaagatgaaggtgacaacaaaagtcaaccgtcatgacaaaatcaatggaaagaggaagaccgccaaagaacatctgaggaaactaagcatgaaagaacgtgagcacggagaaaaggagaggcaggtgtcagaggcagaggaaaatgggaaattggatatgaaagaaatacacacctacatggaaatgtttcaacgtgcgcaagcgttgcggcggcgggcagaggactactacagatgcaaaatcaccccttctgcaagaaagcctctttgcaaccggtgcacttacaatttggtattacctgggagtgaaaagaaatattacagccatgcctaactgacttcttgaggtcagaatggcggcagtggagcatcgtcattcttcaggattgccctactggccctacctcacagctgaaactttaaaaaacaggatgggccaccagccacctcctccaactcaacaacattctataattgataactccctgagcctcaagacaccttccgagctgtctgctcactccccttccaccctcagctctaccctcagcggatgataatctca

SEQ ID NO: 7406 - DNA, 812 bp, Homo Sapiens
  XM_932068
agcacatcccaaaagaataacatttcaaatgtaactagaaaaaagtatgctgaagttcgcaatacagaaataattattaataagatagctttaaagccctgctcagcttttgaatgttgggaattgacccagaggtggctgtaacctaagatggttccttcagtaatgaccattttttctttttcaagatgatgattattccccaccttctaagagacaaagaccaacgagccaccacagccaccagtcccagaacctgccaatgctggggaacggaaaatgagggagttcaactctggccctcacaatccagtggaggagacgaaactcatctgcctctgtccctctgggcacgcctcatgccaggtgcatctgtggacaggggccatgctcctgggcttccaaagttggagaaagctgccaggctcaggtctgaaggccagaattctacagtaagtcctactgagtcaaggtgggagcagggtcggtagcttccgaggctctgcgggagaatccgtttcctggccgtagaggtggcctgcactccgcagcttgtgctgcccgtctcgaatgactggagtttcctgcttctgtcactacacctcccaccctctccatcacctgctctgctcttacaaggatccgaagaaatggaatcatcgtatcgctgatctacgtaaacaaactgaagaattgtctgaaagaaaatatggtatgtctaaactggaaaagtcttgtaatcttaggttcatgggcgtttacacagtggagttactgttcatcatgggggtaccgtggacaatcccagggct

SEQ ID NO: 7407 - DNA, 5567 bp, Homo Sapiens
  XM_932088
gacctcaggtgatctgtctgccttggcctcccaaagtgctgggattacaggcatgagccattttgcctggccaaaattaatactttttatattaaatttacatatatatatatatatgttttttctttttgataccgggtctcacactgtcacccaggctggagtacagtggcacaacctctgctcactgcagcctccacctgccaggctcaagcaattctcctgcctcagcctcccgagtagctgggattacaggtaagtgccaccacacccagctgatttttgtgttttttgtagagacgaggtttcgccatgtttcccagactgttctcaaactcctgagctcaaagcagtccacccaccttggcctcccagagttctgggattacaggtgtgagccatcttgctcattctagtttaaacttttgagtggtttgtgtctcctgattggactcctacaaatacagaattgatgctaggaagggtaccaggagatagacgcacacagatgggatttgggaataggtttggttatccaaggagcagtgctgagctccttgcaatgggatatgggatgctggtgatttccaggaagtgcgctcacaatgactcaagctgccacatactgttgattgtgaaatgccagttgaagcatatgtcctgcaagcttaggggtgctacaagttgaccactgcagcagtaaagatgactctgaagaatggcgtgggatggttcctttcaaatgcacttgagcagcggtctccaaccacagggccacagagctggagctggatctaccatgaaagacttgtgaatccaggaagagagactgactgggcaacatgttattcaggtgggaccatccagttgcaggaaaacaagcttaacacgcccactgattctacattatgctcctacctcccggcagcctctccaggccccgaactttctctagtcagcctctacagaccaagctcatgactctcaatggcctatttaggcccataccctatcacggcagcctccgcagatgaggctactgcctcacaacagcctccacaggcacagctccatcgttacaatggcctctttagacccagctcctgcctcccagccttctctccaggctctgaactttctcaggtctccctctgttgtccaaggctggagtgtagtagtgctatcgcagctgactgcagcctcaaccttccaggctgaagcgatcctcccacctcaacctcccacgtggctgagactacaggtgcttgccactatgcccaactaacatttggaattttcgtatacgtggattccagaggggtgacagcgaaacgtgggaccatccagttgcaggaaaacaagcttaacacgcccactaattctacattatgctcctacctcccggcagcctctccaggcccagaactttctccagtcagcctctacagaccaagctcatgactcacaatggcctatttaggcccataccctacgtcacggcagcctccgcagatgaggctactgcctcacaacagcctccacaggcacagctccatcgttacaatggcctctttagacccagctcctgcctcccagccttctctccaggccctgaactttctcaagtcgacctcaccaggcccagctcatgcatcttggtggcccctccaggcccagcctctgcctcccgtcagcctctacagtcccaacgtctgcctcacagcagattcttcacgcccagcatctacctcactgtggaccccccaagccaagctcccaacctttcagcagcttctacacacccagctcctgccacccagtggcctctttaggccaagctcatgcttcacaagggcctttccaggcccaacttttgtctcatggcaaccttccctggccagattcctgcctgtctcccagcagcctagacaggcccaggtcttgcctcacactggcctctctacatccagcttatgcctcacggtggcctctccacgcccaactcctgtcccaggacgtcatctccgggcccaaaacttactcaagtcagactctctagtcccaactgctgcctcctggtggcctatgaaggcccaaaatctcaagttgacctgtccaggcccagctcctgcctcctgtcagcgtctacaggcccaacctctgcctcatgggggcttttccaggcccacctcttcctcttggctgggtctacaggcacaactgctgcctcacaacagccttttttggcccagttcctgtccagctcatggcggccaatgtaggcccaaaacttcctcaagtcaaactctccaggcccaccttctgcttcccggtggcatcaacaggcccagctttgacttgagaacagcctctgcaggccctgctcttgcctcccaggggctttttccaggcccagctcttgcctcgtggcagctgcccaggccaaatttctgcctgcctgccagcagcctcaacaggcacagctcctccctcacagtggcccatttaggcccaactcatgactgtgaggccatttccaggcctagtgcctgcctcgtggctgactcttgaagcccaaaacttcctcaaatcagccttttgcccaacttctgtctactgttggactctacaggccagcctctgcctcacagtggaccctccagactcagatggtgtctcactgtggcatcctcaggcgaagctcctgcctttcggcagcctctccaggcccagctcctcctgcctcccagtggcctctttcggcccagcccagctcatgcctcccggcggccttcccaagccccgcttttgactttcggtggcctctgcaggcctcgacaaggcccagcctcctgcctcccgaaggcctgcacaggcccagcctctgcctcacagcggactctccacgcccagctagctgttgcctcactgcggcctcccgagtccaaagctcctgcctctcggccgcttcggcaggcccagctcccgcctgccagtggcctcttcaggcccatggggctcattcctgacaacggcctttccaggcccagtttttcccttccggcggcctctccgggcccagaacctcctcaagtcggcctctccagacccacttgcaccctccgggcatcctctccgggcccagctcttcttcctggttgcgtctccaggcccgattcctgcttctcaacaacctctttggactcagtgcctacccatctcctggcggccttggtcggcccacagcttcctcaagccaagctccccaggcccaggtcaggcctcacggtggcctctccaggatgagctcctgccctccgatggcatctccaggccccaaatggtctccggtcggtgggctcctccacgccaaggttgggcctcccggcgaccgccgcaggcccaagttgtcctgaagtcgggctctcccggctgcatctccagggcggactctggcccgactccaggtcccaacaacgtctttggactcagctcctgcccagctcccagcggccctggtaggcccacaacttccctaagccaagctccccaggcccagctcaggcctcgcggtggcctctccaggctcagctcctggccctccgatgacatctgcaggccccaaacggcctccggtcggtgggctcctctaggcccagcttgggcctcccggcggcctccgcaggcccaaatcgtcccgaagtcagtctctccaggcttagctccagcctcccggcggcctctgcaggcccaagtcgtcctcaagtcggcctggaagtgggcctggaagagcagcaagtcggcctccccgggcccagctccgtcctctcggcggcctctccaggtgcaaaacttcctcgagtcagcctctccaggcccagctcctcctgcctcccagtggcctctttcggcccagcccagctcatggctctcggcggccttcccaggccccgcttttgacttttggcagcctcttcaggcgcagaacttgatctccaggcggcctttgcaggcccggcctcctgcctctcgaaggcctgcacgggcccggcctcggcctcggcctcacagcggactctccacgcccagctagctctcgcctcactgcggtctccccagtccaaagctcctggctttcggccacttcggcaggtccagctcctgcctgccagtggcctctttaggcccagctcattcctcacgtcggccattccaggccccgtttttcccttccggcagcctcttggcctctaatttgtttatcttttgtgtataaatcccaaaatattgaattttggaatatttccaccattatgtaaatattttggtaggtaatttatttggagtgagtttctgcgccaagcccgaattttttattttattttccttattatttggtgttaaacaggtttaatgacggtcatggcaactttttggcacaatgaaaaatatcgcccacgatcaacgtgttctgttctggggaagggggcaaaggcagggtgaatcactttcttaaaaagtatagctcaagttgggagtgcagagggaatggggagaaaaccctcccgctgcctgtgtcgaagtgcaggagcccccacccccatactcacctgagtccagcccctctggggaaagaaggggtgcatgaactccccctagtccacaggcgcctccctgtggcccaaggccctcttcacactccatcttgtagccccagcaggagctattttccgaaaagtgaaaagctctgaaggtcccacaattcatggtatgtacaggggctcggaggagggaaactgcccagctttcccccggcacagctgcaggggtagggggtatagataagaggagcaggccttggccaggcgtggtggctcacgcctgtaatcccagcactttgggagggggaggcaggcagatcacgatgtcaggagatcgaaatcagcctggccaagatgatgaagccccgtctgtactaaaaatacaaaaattagccggacgtggtagcgtgcacctgtaatcctagctaccgagaaggctgaggcaggagaatggcgtgaacccggcgggaagaggttgcagtgagccaagatcgcaccactgcactccagcctgggcgacagagcaagactcggtctcaaaaaaaaaaaaaaaaaaaaaaaaaaagaggaaggccttactccgtcccaaactgaaaggattaaatggcttcacctgggagaagataaccatcctgccctccattgctacccccacatactgtccatgttctcagggggtactgtgagtcctgggatctttggggttgcccacctgcctgtggtagctatggagacccccaggtgttgaggcagggctggggtgtccccttccaaccaggctgtcaaggccccaactctggggcagaggcagtggcagggcagccagggttgcgccagagcctgagcaggttgaggtggggtcaggcagggctgggagtcagggcaggggcagcagcagtggacctgctatgcacacatcttcttctccaaggtttgtgtgcagaacatcctgcccatgctgcccca

SEQ ID NO: 7408 - DNA, 1240 bp, Homo Sapiens
  XM_932470
ccgaggccgggccggagccgcaggccagccgcgattccttcgggcgatgctgggggctttccggtcggggccgcagccgcttccggagccgcgggcgaggtgcaagcggtcttctctgtcttctttatggccagtaaaattctccagaagagatttatggcagcctcactcccagtagtttctgcatttagtgagataaggaatggattttcttctgtgtattgctgacacgaacaggagacggaaatactgagtagaagagggcggttccctggctaaggccccaccctcaagcctggatacccgcggccctaaatgagaagaggcgtttctgtttggggcccaaaaagttgctttttgacccaccacgccccctatcctgcccccatataaaccccaaaccccaacctccagagcataccagcaggtgaggagatacgaggcaagccgactgacggcaaaacgacgtagcagagaaagagagaagaggagggacgtctggacaccgagagatgtttggctcggggcagtcagagcggagtccagcccctgggcggcccaactccaggggaagatcaccttcccacttcatccatccccacccttccagctccccatccatcctgctgaaagccatttccaccactcaataaaacctcgcattcatccttcaagtccgtgtgtgacccgatttttcctggattctggaaaagagctcggaatacagaaagctgtcccctggtcctttgcccttgtgaaaaagcagaaggtccattgagctggttaacactccagctgtctgtggtggccaagctgaaagagctttgtaacactggggttgcaggcacccacctctagacgctaccgcagagccagagcccaaagccctcaccccggcctctgcacttgcccatctgcgtgctccccctctcgcaaggggtttctgcagagggggctactgaacaggtgagccacacccctgtcgcacgccctgcaaggggaatcagggaactcttccgtttcattgctttgaccacatcctataaatcttgttctccttgtctttcagctccaatttgtttatacattcagtttttacttttgactttactcatgatttattatagaaagatgtttaacaattttcaagcaaatggaataatttttgctcctctttcgttgttaatttattattcattggagttagaaaattgttgctaaaataaattctgcattttga

SEQ ID NO: 7409 - DNA, 357 bp, Homo Sapiens
  XM_932522
atgtcaccctcgcgtcctgccaccccttgtccccgccgcactcggcccccatgtcctcctcccgggttccctgccttcaaggcgcgtgagagggggggccggcctcgaaaagggcggcgggctgcgccgccgtctgtggggcgcaaggctcgcgtgtccggggcccccgcccgtgacgtcatccccgaagggcccgtgcctcccgggcctggccgctacagagctccccaggtcgcgggggccgcttcctgcccggcctcggggcctgcgcacaggccccggggccgctgcccgggtagggacaccgcagagagcccgagcacccatctcgccacgcacggccttcgccggccctga

SEQ ID NO: 7410 - DNA, 1042 bp, Homo Sapiens
  XM_932672
gaatgccacacacccagcaccgagaagcaatactttgggagttaacagtgcaaagatgaacctagtggctgtttccaccaaatcctcctgtctttcgtggccaacaccccaggcaaggcttggggcccccgtctgctgctggacgcagagccatgaagaagaagttagtggtgctgggcctgctggccgtggtcctggtgctggtcattgtcggcctctgtctctggctgccctcggcctccaaggaacctgacaaccatgtgtacaccagggctgccatggccgcggatgccaagcagtgcttggagattgggaggaaaagctgaggtcatcaatgcccgcgaggtggcccccaggctggcctttgccagcatgttcaacagctcggagcagtcccagaaggcactttaggaggccaagtcaggaggagcgcatgagcccaggagacctgcctggacaacatagcaagactccatctctacaaaaaatggaaaaaaaaattagcaggagggctgtcggtggcggtgcctggggagatccgaggctatgagctggcacaccagcggcatgggcggctgccctgggctcgcctcttccagcccagcatccagctggcccgccagggcttccctgtgggcaagggcttggcggcagtcctggaaaacaagcggactgtcatcgagcagcagcctgtcttgtggtatgtctgtgggtgcggccccctgacacaggcagggcaggcacagcccaaggaccttgcaggccgtagcagcagtggagcggccctctgccttcaggaccctgtgctgataatgggatgaggagatacagacccttcccaccacgtgtggggacacattctgagcatggggtcccagtggccactgtggctggccacgtgtcctgagtggcaagggacactaggaggctcccggaagggacactaggaggatgagcgctgagtgacagggccacccacctgtgacaggtgctgcccctgctttgtgctggtctcctgtgtgggcaggtgtggggggtggtc

SEQ ID NO: 7411 - DNA, 694 bp, Homo Sapiens
  XM_932678
ttcagaaaaagcggatggtggttcctgctgccctcaaggttgtgcgtctgaagcctgcaagaaagtttgcctatctggggcgcctggctcacgaggttggctggaagtaccaggcagtgacagccaccctggaggagaagaggaaagagaaagccaagatccactaccggaagaagaaacagttcatgaggctatggaaacaggccgagaagaacgtggagaagaaaattgacaaatacacagaagtcctcaagacccacggactcctggtctgagcccaataaagactgttaattcctcaaaaaaaaaaaaaaaaaaaaaagatcagtggttgagatattctgcagaccctgcacttgatggatcagctggcaccacccagatcaataaactggctcatctgatcttgtggcccccacccagaactgactctgaaagaagacggctccgacttcctacgatttcatctctaaccaatcagcactcctggctcactggcttcccctcatctgccaaattatccttaaaaattctgctccccaaatgctcagggaggctgatttgagtaagaataaaactccagtctcctgcacagctggctctgtgtgatttactctttctctattgcaatttccctgtcttgatgaattggtctgtctatgtagcgggcaaggtgaaccccttgagtggttac

SEQ ID NO: 7412 - DNA, 831 bp, Homo Sapiens
  XM_932687
ttgtagagatggggtttctccacgttggtcaggctggtctccaactcctgacctcaggtgatctgcccacctcggcctcccaaagtgctgggattataggcatgagccatcgcgcccggccagtgccagcaaattctaacccgatgagttttgctaaatgttgacatttggcgctttgtctggtgggtcaggtgagagtctgcgcaatcctccacatcctcagcccctcttcagacacgagcgccagcctgttcctgccactgtgtcctctggtgcggcctctcgctgggcatgggccctgcagcagcacctggccatctaagttcaggagggtgctgtgtgctgcctctcccttcagtcctgcctccttcaatctcagcagtcccaggtctggctctgctcccaggacgctggactctcccctcccagtggactcgcaggctggccgcctctgctcctcccgaccgcagcccctacctctctcccagactccagtcgcccgtgcccaccgctgcccacgtggcctctttccaggcggcagccagggcttctggcacgtcgggcgccagcactgtcgcttgtggccacggcccgcggagcttcagtcccttgagctcctcctccagagcagggccgagggtctcgccccagcccgactggctgtgcctgcagatgatgctggtcacgcagcttttcgtttcccggaacgcaggtgggatagcagtgcccttttctggcagtgcggcattctctctggcagtcattccgcccggagaggctcatcttgggcggttctgggcgacagctgtgtggctgcacagtggccagtga

SEQ ID NO: 7413 - DNA, 913 bp, Homo Sapiens
  XM_932705
tcgcaaagagaagggaagatggaactgccattttgcacgtgtcaagtttcaggtcttgacgttgggaagtaaaagatcagagtgctggcagattttggtgtctagtaaaggacggctttctagtgtatagataacaccttctatccatgtcctcacatggtgaaaaagtgactgtaagtttcctgaggcctccccagaagcagaagcctgtatactcggcagaagtgaggtggctggcaagatggctaaagatgaacagctccagtctgcagctcccagtgagatcaatgcagaagaatttcaggacagttttgtcttacgtgggaacagggagcaaaagaaggtacttcaataggatgttggaaaagaagacttccactctaataggatgaaaaaatgatcatttatttacatcattctgatttcttttaattgcttcacaatccactataaagaagattcgctctgaccctaaattttctactttttttcccacttttctctcacataaattaggtgtttcattctttttcctccttattattttatttacaccattctgtgttgagcacagaaaggtggaagtatatagccctgttctctgtttttaatgctctgtatatttttgtttccttttctgtggaatcagtttttcattatccttatagaatcagtttttcattatccttataaggagatgccatttttctcaatctttccttaaaatctaactaacttctttactaagtcatttctgttccttatagaatagtgaatgtgactgttcttagtgtattgactggtccctttacatcagcattgtaacttttaggtattagtttactttcatatgattgttatttcatatatcattgtgaacatatttttttccaaaaataaaatacatattgac

SEQ ID NO: 7414 - DNA, 1395 bp, Homo Sapiens
  XM_932812
atgaaggagtacactaaagatgaggaactgagtcaccgcaatgccaaatgtaacacgctgtgggtcaaaatttggatggttgcgttggaaattattctgaagccacagacagggctaaaaggactgagttctacatgttatcagaacataggtctgggaaccagggaagacgtcttgctgaaaccgccaataggaactagctcctcaaaacagagacgccaatacagacgacaaaaccagcagtcttcatctgactctggttcctccttctcctcagaagatgaacgacccaagagatcccatgtgaagaatggtgaggttggcaagcggcggagacattccccttcccggagtgcttctccatcaccacgaaagcaccaaaaagagacttcccctcatggtagacggaggagaagtccatccccaccacccaccagaaggcgacggtctccttctcccgcccctcatcctcgacggctcaggactcccacaccaccaccaccacgacgaaggactccttctcctcccctacgtcggcgctcaccttctcctagaagatactctcctccaatacagaggagatactctccttctccacctccaaagagaagaacggcttcacctcctccccctcctaaacgaagagcatcaccatttccaccaccaaagcggcgggtctcccattctccaccttccaaagaagctccccagtcaccaagagacgttcaccttcactatcatccaagcataggaaagggtcttccccaagccgctctacccgggaggcccgatcaccgcatccaaacaaatggcattcgccctcatcacggcctcgagctcctcagacctcaagtcctccacccgttcgaagaggagcgtcgtcatcaccccaaagaaggcagtccccgtctccaagtactaggcccattaggagagtctccaggactccggaacctaaaaagataaaaaaaggctgcttccccaagcccacagtctgtaaggagggtctcatcctcccgatctgtctctgggtctcctgagccagcagctaaaaagcccccagcatctccatcccccatccagtctcagtcaccgtctacaaactggtcaccagctgtaccggtcaaaaaggccaaaagcccaacaccgagcccatcactgccaagaaattcagatcaagaaggagatggaaagaaaaagaagaaaaagaaggacaggaaacacaaaaaggataagaagcacaagaagcacaaaaaacacaagaaggaaaaggctgtggctgcagctgctgcagctgctgtgacccctgcagccattgcagctgccacaaccacattagcacaggaagagccagtggcagcgccagagccgaagaaggagactgaaagaaaaaga

SEQ ID NO: 7415 - DNA, 2480 bp, Homo Sapiens
  XM_932991
ggctggtgtttgtcctaagtgggtacttgcttgggttgagaaatcacattttggctattccccgacttgaaccaggggatagaaatcgtagtcaccggctgggcgcagcggctcatgctgtaatcctggcagtttgggaggccgaggcgggcagattattgaggttaggagttcgagaccagcctggtcaatatgatgaaacaccgcctctagtaaaaatacaaaaattatccgggcgtggtggcgagcgcctgtaatcccagctactcaggaggctgaggcagtagaatcccttgaacctggggtgcggaggttgcagtgagccaagatcgcgccactgcactccaggctgggcgacacggcgagactctgtctcaaaacaaaacaaaaggaaaagaagagaaaagaaaaagaaacgcaggcaccctgaaatcgaaacttgttaggaccaacaagccaacgacagacgaatctgcggggtcctgcgacagacacgccagccccgccgccacagcacagggttctggaggtcgagctgttctgcgggttctgcggcggcgctgggaagagacggcgcccgggcagctcccctgtcaccggcttggaggagcggcgggctcccctagcccagcgccgccgccgccgcccgggaacgccaggctcaccccagctggggaagctccgaatccctcagatcggcgacctgagtgctgtcgccccgagaaaatggaggcatcgagcaacgagctgtgctgagaccgagagacctcagttctgcgaaatgtcggtgcctggagcttgcgaatgactgcggccggcgggttgtcaaggacaacattccttatggcgcaaccaacagcgctgtcaccaagaaactggactctgagaaaaaagagggtttcggccaccgagaaactccgtgccacatgtgccgtgacagcaaaaccgcccgctccgcgccgctggtgaaagagctaacgaacgccaggtgctgcgacagtgacaccgggactagaaggcctcggatggagaatgggacgcccagagcaagcaggaaaacgttttgtttggctcaactagcgctgtcgcaaccggaaaactgtcaggccagtgctgctgcggatgtgagaaaccggtgatccgaaggcggagtggcgctgggcgctggactcgctggtgtgaaaatctggctgctctaggacccggcaagcgcgggcaccaggcgaacgccagcgactttgccagacaaatgcatgtcttttttggtcgccattcaaagatgcagccggcagtcagccccggctctgagaaacaagtggaggtgtcagccataaaccctccgttcagggaaaagagagtcgctgcgacggatcgactggccgttgggtggaactttctttggtggcctagtgactagaaaataaaaacgaaaacgaaataaaaaactgctactgacattactcccacgctccctcctcaagtcagtggcttcaggcttaagaaaacctgtatttttcttggctgatccgtgatccctaattactgagggccccgcgacccaccaagtgcgattcgcagagggaaaggagctggaataaggatccagaatgggacggatttggctcctccaggaagaaagcaaaacaaatgcaggtcgcgaacactttacattgcaggaagctgctcttccagtggccgcggctgggtccttccacaccacctctctgtcctaggccttcgtcccggttcagccctcacggattctaggctagcggtcaacaaccgcatccctccggaacctggaaactctaggtccgagatctcggtgaagaatgaaaggcacagcgccgctcaacccaggcttcaggcctgccccgctggtcccgtcccttccctgtgggatggaactctgtgggaatcgctccttattctgatggttcactcattcagatgtccttgatatttggggatatttctaaaacagctggggagaaaaatggactgcgaggctccggtgttggacgtgaaattggcagtgagacatccgcctctaagcccagggaaaagcttaaattgtggttctctgtctctagcaccgtgatctttgaaatgcgttattgattttcttctttcttctgggaaatgcaatgcagtactatccttttctgggggatcctaggcagaagcgatggcaggacaaaggcagagaaggcactgccaggtcctgcatgccagtaaaactactcatgtcagctgttctgcaggatcccatgagaaggtgagtcaccagaaaatgcagtttccacatcctgatgatttcatctccctaccccaactgatcaatttctccaattttccagcctctcaccctccacaatccccttaaaaactgtagcccagaactctctggaatgatgaatttgaaggtttgctcctgtctcctcactcagaagcctgtaatcattaaactctttctctga

SEQ ID NO: 7416 - DNA, 989 bp, Homo Sapiens
  XM_933028
agattctctccagcggcagcggaaaacggacaatgggtggattcgggtccagattctggtaggagggagtttgggatcgagatctggaaaaaagcactagactggaagaggacgcgatggagtcggagccgctggcggggacaaaaaccagaggccggggaaggcgccggtgggaggcaaggcacggatggactttacctgcgcacgcgtcgcagccatctccgcgcacagtggtggccaccgcgactggtgctgaagtgttggcgcgtgccgggcgctccgctgggacccgggttgctggccctgagtctcagctttctcatctgtacggttgggacaagtacagtaaccctcgcccgtcaagacgggccagggctgtggcgagggtccacgccttagagcaggtacctatcttgtgcagggccctgagatggggtctgactcagttcctgcggggaacttcaccagtgacccagtcagtgcccttcagttaaagaccaccaggagcacacttgcaggagtagggctgattggagccattgtacagtgtcgggaacataccaggacactgagaatagtgtcatgtcataaggacccagagcagatggaccctgctgtgatgcacaaagaggaccacgcaagatatgataaagatctacatcactgaattttggttccatttttgtatctcagcttccaggaaataaaaaagaattctaacattcatactttcagtattttatgtgagaggttttgttgtcaaaatcaagtctgagagcaatgtttgttggggcctttaattggagtcaccaagcgataaaggggacattgtcctcaacaataaccctataataaacacgttttggacaataaatatatgacaatttcttaaaagcaatttcttgggcaatcaagacagtatggcttgagtatggagttatacgatggtttggattaatccagtattaaatctttggttattacagaaa

SEQ ID NO: 7417 - DNA, 2852 bp, Homo Sapiens
  XM_933085
aagcccctcggctcggccgagaccgccgtgcccattgctcgcctcggttgccgccgctttagccgcagccgctgctgccgccgccgggggagaggcagcctattgtctttctccgcggcgaaggagatggaggaggacatctggacagtgagcaggaggcgcttcggcccatgccgaacatcccaggggacctggagagccgggaggccatggtggcatttttcaactccgctggagccaatgcccaggaggaacaaagggtgtgctgccagcccctggctcacccagtggcctcgtcccagaaaaagccagaggtagcggccccagccccagagagtgggggtgagtctgtgtttggggagacccaccgggccctgcagggggccatggagaagctgcagcgactttatggaaggagaaggtggacctgaaggagcgggtagagaaactagagcttcaattcatccacctctcaggacagacagacaccatagggagaaagtacatcagccagggggcagtgtcagagacgcagcactgggagaggaggacatcgtcaggctggcccaggaccaggaggagatgaaggtgaacctgcaggagctgcggggcaggtgttgcagcttgtgggagaccacaaggaggggcatggcaaattctgaccattgcccagaaccctgctgatgagcccactctaggagccccaatagcccaggagcttgggtgtgctgacgagcagggtgatcaccactggattgctgacagatagaggacgtgggaccgtgactatcacccctaatctgcagtggatttggctctcggcactcccaggctgggagctggatacctgccctggcagcatgactcagactgcatgacagtggccggacaccccctgggatggctcaaaggagtcaggacttggaagtggggacatcagggtagctgaaggaaatccacacacccagagcatctcggagttcagactctcagacctgaagtaggcgcccccgggactgggctaggagttggacggaatggaggatggaggacagcgagaagaaaggaagagaaatgcaacgtgtgggcagccgccaagagtgaaaatagagggaagtgtcatgcaagtgctggacagaaggcggcaggtgggacgagccccacagccccctcctcaaaaacgaccacctccaggactcagtgatccctggggggcaggctctgccagccctcggccacacgtggctccggcacccatggtcccagtgccttggatggagacggccagttctggcggccagatgtggtgctctggaatccagtcccatttccttcctggccacgcctgtccagcggcctcttcagccgcattcagcccctacttacctggggaccccggctggggcacgagagcaccaggggggtagggcccaaagggatcaggggaagcctctggcctggagggtatggggcacgcttccccaagggcggacccggcaggaggaagcccaggagctgggtcctgccgcccaggagctgggccctgccacccaggccgggctagggacatggcagggcctgggcatcctgacgctggacttgggcgacctgggaggcacagggaggggagagatgggcgaccccgccccagcgcagtgccggccacaccccaaggcggttgccagagcttaagccccgcccccagcagcgagaacatcccagctccacacaccccccccccccccggcagccagtgctccttgtcaagctccccccgtcactccaggtgggagccaccccggtgagggggtgtgccacttgcccccagggcactcctctgggcatcccgggtgggggattttggggccgtggggggcagtctttggtacctgtgttcgtcagggatgctctgacaaccaggtgtcgtccacgggcgggggcatgggcatggtgacagtggtcctgttgatgtcaccgatgatgctgagcgcctccttcagcgcgtggtgcatgtgcagcatctcgtcatgctgctgtgcctgctctgccaactcctccatcagtgtgttctggttcccacatgagtacatattggccagcggctccgagatgatgaactccggggtctgagagtgggcaaacagggaagaaggttgggacctggtgcctgtgccgccctggctgccttgctgggcccttctgggactgtgcgctggacttggagccccttggagtatggcttttcacatgggcttctataccgcttcgactggaagatccacctccccactgccttttctcactcagatggggacaccgaggtccagaggaaaagacacctgtcaaatgtcacagatctgggaggggacttaagacttatcatgccaagaggacacctgtctactcagtttttttttggtggggcggggggcggtgatagggtctcgctctgtcaccaggctggagtacagtgatgactgctcactgcagcctccacctcctgggctcaaagtgatcctccaacgtcagcctctcgagtagctaggactacaggcacatgccaccaccaagcccagctatttttaaaatttttgtgtggagacaaggtctcactatgtggcccaggctggtctcgaactcctgggctcaagtgatcctcctgcctcggcctccaggagtgggagttggagttgatgcctggatacaggagctctgtgggtgggagtgagacaaaacacagggtcctgagctctggggaccaagcaatgtcctctggtgaaaaaaatcctggacttgctggcagaagatttgcctcttactcgccatgtgctctgaatacatttacctgccct

SEQ ID NO: 7418 - DNA, 1454 bp, Homo Sapiens
  XM_933103
aaaaaattgtcactggttatccttcaggtataaaaattacaattaaaattgtaatgttataaccttccattctttcccctatgaattaaaacttttttttttaacgagactaaaaaatcaagttgataaaatctatgccctgtgggaactggttaggtcaggctacccactccagatttccagcaggctggcctcagctctacctacagccagtagcttattaaggctctaggcgccagtgacaccttcagacaggtggttagtgcgccctaaggactctccgcagcgtcgctcaggttcacagaacacgcccaggggcgtgtccagctgtcgtcggggagagcccacctccccggggggtgtggctaagggacgaggcagttctcgtccagagcccaggtaatccgggcgggatcagctagcgtcgcgatgtgatgacgtcaggccccggccaggccgggagtggcgtgctgggcgtgcgcggctgcggtacggcgtgttggtcccagcggttcagctgaggtagggacgtgctgtaggccggaatgttaccggctgttggatctgtggatgaggaagaggatcctgcggaggaggattgtcctgaattggttcccattgagacgacgcaaagcgaggaggaggaaaagtctggcctcggcgccaagatcccagtcacaattatcaccgggtatttaggtgctgggaagacaacacttctgaactatattttgacagagcaacatagtaaaagagtagcggtcattttaaatgaatctggggaaggaagtgcgctggagaaatccttagctgtcagccaaggtggagagctctatgaagagtggctggaacttagaaacggttgcctctgctgttcagtgaaggacaatggccttagagctattgagaatttgatgcaaaagaaggggaaatttgatgacatactgttagagaccactggattagcagaccctggtaagaagtgagattattaataaccagaatatagttctgtgatatattgtaaatagatgtattagaggaatatctaaaatgagtattaaagcttttgttagtattaaaccaaaaactttttttggtttaaaagaggaaaagtacttggttgtcattttctttggcagttgaatgaatgatcagagtatttcttggtgcttttaagctgttaatagaatttgaagttttattgattgacttaggattatttgtaagaacagaagttgttaaaaataaggacatgtaggaagagcagagacgttctacctctaagtacagttgtcccttggcatccatggcgtattagttccagaacctctgaggataccaaaatctattaatgttcaagtcccttacataaaatggtgtagtatttgcctataacctatgcacatcctcccatatactttaaatcatctgtagattacttataataccta

SEQ ID NO: 7419 - DNA, 4410 bp, Homo Sapiens
  XM_933119
attttaactgccattctggcaactgaacgttggcagtaaacgcagcttagttgtctcagaggactcacaatgggatgtgcttatagttgttgcctcgaagtgtgttgtggcaaggatgaaatagtgtatcctaggatgccaggggaatccaccgtctgccaccgcgagcgtgagaagccaatcacctatcactggtatcactggcatcccggccatatataccctagagttgcatcaatggaagattacgatgaggacctggtgcaggaagcttcatctgaagatgtcctgggcgttcatatggtggacaaagacacagagagagacattgagatgaaacggcaactacggcgactacgggagctccacctatacagcacatggaagaagtaccaagaggcgatgaagacatccttgggagttccacaacgtggtgacctggaagacctggaggagcatctgccagggcagacagtctctgaggaagccacaggggttcacatgatgcaggtggacccagccacaccggcaaagaaattggaagactccaccattacaggcagccaccagcagatgtcagcaagtccttcctctgcacctgcagaagaagcaacagaaaagaccaaagtggaagaggaagtgaaaaccagaaagcccaagaagaaaaccaggaagcccagcaagaaaagccggtggaatgtcctgaaatgttgggacatttttaatatattttagagacctctgaagattcctcgaccaccaggaagggccccgacgtggggatgtcaacatggctcagacttgatgtggatcgtgatcatttcgggaaatgtgttactccaaaaacttttataatctttgcttaatttgtttttaaatactttcctggctgggcgtggtggcttatgcctgtaatcccagcactttgggaggccgaggcgggtggatcacctgaggtcaggagttcaagaccagcctggccaacaaggtgaaaccccgtctctactaaaaatacaaaaattagctaggcgtggtggcgcactcttgtagtcccagctatttgggaggctgaggcaggagaatcacttgaactcaggaggcggaggttgcggtgagccgagatcatgccactgcaccccagcacctggctacagagtgagactttgtctcaaaaaaaaaaaaagaacaaaaaaattctgactttaacctctgtttttcagagggcacaaattgttcttgtattgtttccattttacatttttttcttgaagttattttccaattgttttcattctttctgaagttttgtttactcagttttaagtttttgtaattttgatagacttttgtgctttcattttcttaatgacttttacctcatttttaaaacaaatccatagtatggtaagttacatcaatatggagtatttttatgttttgtggtgatttacattctgtatgtattttacatatataaatgttaatggcctggtgcagtggctaccacctgtaatctcagcagtttgggagaccaaagcaggacgattgcttgatcccaggagtttaagaccagcctgggcaacatagtgagacctcatccctacaaaaaaaaaaaatcctttaattagctgggcatggtagcatccatctgtagccccagctacttgggaggctgaggcaggaggactggttgagcctaggaggttgagcctccagtaagccatgactgcaccactgcactccagcctgggtgacagagcaagaccctgtcttaaaaaagaaaagtttattaacgtgaatatcagttagaaatctagttgttcattgcaaaactaaaccagattatagcagaaataagcacttggagggaaatgttacattttcactgcaggccttgaatccttagccaccagctccgtgtccttcagtgttctgtggttcctggttccagagagatcacctgctccaatgtaacgagtgaagagttctttaggtgatggctgctgggcccagctttgctgttgtctttgctgtcttgtaagctttgtgtcgctcaagttcagttgtgtatgagtgtactaaccactgtgagcttctccaagcatgtgcaagcaatttgagaggagcctaatatttgcaaggaatttgagaggagccttttaaggatgttttattggcgggggtcaggtgagggagataacacgggggcaagaaggaaagttattaattcatgggaaactaccagcccttcatcacctaacttgtgatttacagacactgagcacattgcaggttgagaaggtgcttggtcctttttgtagccttatgctgtgctcttcagagacgtgagtgtgctgctttttctcaccattttgtttcttgtagattgttttccttgatgctggaaaacattttgaagacaagactctaaacagtgacctatgccacactagtttattggaaaatgagaaacttacattactgacaagcttggaagattcttcagtcctgcagtgacctgtgtttccctggtctttaccttaccaatctgcttgattctcctttcttgtggcagtagttatgatgccaacttttggggttctttgtcctcctcttttcttcctacctgccagcattcaaatggccacttctattaagtgatggaattcaagaatgtatttatttattaatcctgatattgtttcactcatccctcagcttaacatttagggtacaaagtagtcacctagaggtgccactcaatatacagcactgtgtttagaaattgagggagccgtgaaatatttagcctctgctctctgagacctcagccaggtgcaaagaagagatgcagaaccacatttcagattgtgttgtgtacaaccagcagcaccaaaatgtgcctgggaatcatgggggtcagaaatttacctctgaggcaggtatggctgaagctttacgaaaagagatggggcccgtgccaggccttagacgtgcgagaaggagggcgtgtcaggaagcagaaacagtatcagcaaaggcgctgctgggaggcatgtgggcagtgtttggggaacggccaggggctttctgtgtcaggtttacagcatctgtgggaggctgcgttggtaaataaccccagagaagtaggctggggctacttacattaaaagtatgcatggctttgaaggccagctgagtggtataaatagaaactacaaatagtatcacatttattgaggacagcttgtgctgccaaaagagtttttaaaatttttttggattgtgtaattggtggataaagaattattgacctaaatgtatctgatcttagagtgttttagtatgctagattattggaggtgaaatggctaagtcaaaggtgatgagtgtttttgagactcttaatgttaattgcaaaattaacctctaaaaaggtaggccgggcgcactggctcacgcctgtaatcccagcactttgggaggccgaggcgggcggatcacgaggtcaggagattgagaccatcctggctaacacggtgaaaccccgtctctactaaaaatacaaaaagttagcccgatgtggtggcaggtgcctgtggtcccagctactcaggaggctgaggcaggagaatggtgtgaacccaggaggtggagcttgcagtgagccgagatcacgccactgcactccagcctaggtgacagagtgagactccacctcgaaaaaaaaataaataaataaaagccagtgccagcttagaccatgactgagagctcttggtttatcttatccttgctgagctgggtgttacaacattgaagccttctgcagtgtcctccctccctttttctctctttctctctctctcctccctttcttccttttacttctcttatgataggctcgtctgtacttttttgatagaggtaaccatttgccacaccattttctgaagggcctgctctcttccccattcatttgtgatggcacatttatcctaccctaagctttgataacgtgtcaggatctttctgtcctgtcctctcaaagaggttaaatatttttttataatgacttataattgactgaagttataacagttttctcatgtcaagtataaaaacaggccaggcgaggtggctcacacctgtaatcccagcactttggtaggccaaggtgggtggaatgcttgagtccaggagtttaagaccagcctggacaacatgggacaaccccatttctacaaaaaaaaatacaaaaattatccaggcgaggtggtgcacgtgtgtagtcccagttactcgggaggctgaggtgggaggatggcttgaatctgggaggtgaagattgcagtgagctgagatcacaccactgcattcagtctggataatagaacaagactctatctc

SEQ ID NO: 7420 - DNA, 1913 bp, Homo Sapiens
  XM_933375
gaaccccaggaaaggacggaacagaacaggacagggcccccagccccatctttatctcaccggctgctgctggctgccaagcctcccctgaatgggggagggtggtctgtgtgagtcagcggaggcacgaagtggaggaagacgggagcctctgccaggcccgttgagcgtggcctcagaaatgcgccgctgggttagggtctccccgaccgaggctcgaatccaggtcgaagggtcgccggagcgatggttggagaatgtggaaggagctggaggacacccgagtattcttaaagcaatccccatggccaaaatcaacagctgatctggataccatcaagacacctgaaatcttatcatgagccagatgctgaggaagagactccgggaggatcccgaggacggcccagttgcagccatgttgagactgacgctgaggaggaccccaactgtcacgagcaacacctgtcgaacacagccacccacctggggacagatcaagaagctgtcacagatggcagaagaaaacctgaggaaagcgggacaaccagtcacaatgagtaatttcatggtagctatgatagcagttatcaccactgctgtgagtattccttcaacaagggctgacacacagaacaattatacttattgggcatatttatcaaccttggctggcaataatgcctagatgtaatcactctatgacacagttacacatgctttctgatctcagtatttaccataatctgctcctataattgaggcataccgcccttaaaaacctatttgtaaacaaaattgaacctggccagaaaaaatgaacgtacttgtttaggaagattgcattgcagaacaggcagaggtgctgcgcaacgattcctatggaatcactgttaattggtcccctaaggggatgtttagcttaaattgcacctctcagcctgcgtgccacggccacactatgtgcagctggtctgaacaaaacggtcagatggtagaaacaataagaagtatggcaaaagttcctattatctggaaccatgctggtatagtggcacctcaacctcaaacgataaggcccgctgtaggagctaaacattaaggatttgtagaaactattaatagctcttaataagatcaaaattggggaaagaataaagcatctagaaggacactctacaagctttttggatacagtaaaattaaaagaaaaaatatttaaagcatcccaggcacacctgaccttaataccagcaactggagtgcttaaaggaactgcagacagatttgcagctagtaacccattaaaatggataaaaatacttggaagctctgtaatttcaatgatgtgattgtgcttttaatctgtgttgtttgtctttgtatagtctgcagatgtggatcctaactcctgcgagaagtaactcacagtgacaaagctgcctttgcttttatcgagttgcaaatcaaagaaggggggacatgttgggaacaggccccccaagatctggccataaactggccccaaaactggctataaacaaaatctgcagcactgtgacacgttcatgatggccgtgacgcccacgctggaaggttgtgggtttaccggaatgagggcaagggacacctggcccacccagggcggaaaaccgcttaaaggcgttcttaaaccacaaacaatagcctgagtgatctgtgccttaaagacacactcctgctgcagataactaaccagacccaccactttacttcggcccatcccttcatttcccataagggatacttttagttaatctattatctatagaaacaatgctaatgactgacttactattaataaatatgtgggtaaacctctgttggggctctcagctctgaaggctgtcagacccctgatttcccacttcgca

SEQ ID NO: 7421 - DNA, 8061 bp, Homo Sapiens
  XM_933557
aatgaaagaactagaacttttatgttcaatgaaggaagtctcctttgatgggaatgatcttgaaaacatggtcctatcactgagggagaagttcctacaagaagtgaattctcttattcagaaaccctcacacccactggctaaaacaaagacgttagtgaagagtttaatgaaccgagccgagctgttgctgcatgtcaccatcgcagcccagtcgggcctcacgagaagcatctctgggacccctgctgaaacaccagcttgtaaatcagcttctgaaacaaaagtgatatctcacgctgtcaggcagcctgtttttcttcgcagcatgtcagctccttctgacctggaaatgattggtaatgaagatttggaatttactagagcaaatcagaggcgtcgccacgtgaccagccaccgcagcagctcctttacactcctgcagtcgctggccattgaggacagcagggacaagcccacctacagtgtcctgctagggcagctgtttgctttcatcggcaccaaccctgaccaagctgtgtccagcagcagtttccttttggctgcacagacaaggtggcggcggggaaacactcgcaagcaggcactggtgcacatgcgggaattgctgacagctgccgtacgagtcgggggagtgacgcatcttgtgggtccagtgacgatggtccttcagggaggacccagaattgaagaactcacatgtggtgggatggtcgagcaggtccaggaagcctttggcgagaccatgacctctgttgtgtctctgtgtgctcgttaccctatcgcttgcgcaaatagcattggactcttatgtaccataccttacaccaggagcgaagagaagtgcctggtacgcagtggccttgtgcagctcatggatcgactgtgtagcttgagcaatcagaccgagtccagctccagtgagaaacagaccaagaagcagaaggtggccaccatggcctgggctgccttccaggtgcttgccaaccgctgtgttgagtgggaaaaagaggaaggtggctccacagaggctgtgcactcaggtctggcccggcaggtgtccagccttctcactaaccatcttgcccgagccacagagtgctgtggcaaccaggctgctgggaatgacgcgctccaggatgtccttagtcttctcaatgatctctcaaggagccacataggtaaagccatcctgagccagccagcttgtgtgtccaaactcctctccctgctgcttgaccaacgcccgtctccaaagctagtccttattattctccagctgtgccgggcggcgctgcccctgatgagcgtagaagactgtggaaacgtggagctcccaccctggagctactctgtcccctccttaaacagtgagcaggaggatcccagcgacccagcttccaagatcgcctccctgctcttagcaaagctggcagattatgtggttccaggatgtcagacagttctttctccaaccgcttctgaacctgacaccacattgacaaaaaccagtcccaagaattccttgaaaggagataaagatcctggagaagagagtgaggctgtggatggcaagctctcgatatttatccacaagcgggaagaccagtcatcccatgaagtcctccagccattgctaagtagttcagaaggacggcccttccgacttggtactggcgccaacatggagaaagttgtgaagatggatcgagacatgaccaagggtggctgttgcgaagtgattacagaagaggctgcagccgccctgcggaaagccaccaagtgggcacagtcaggcctcatcgtcagcattgggccacctgtagagtctatcaacccagagactgtgagtggactatccacaggcgacaaaaagaaaactgcccaaacttccatttgccgagagaggaactcggagcttgcaaggactgatcctgtgcgtcccttcatcagtgggcatgtggcaaacagcatggctgcagaagtgatcgccttgctacatagcttgctcatggcacctgaatcaaatgctgctcaaatatggaccacaacagcagagaaggttctgtctagagcactgatgtacattccacaattggggaaatacgcagaaagcattctggaaaatggcagcagcagtggcaggaaacttgccaaacttcagagaattgcacgccaggccgttgccgcactgtgtgcacttggaggcttcaaagagacaatcaagataggatccgaggttcaggttttaggtagaggaatttcaggaagcattggagtagtggcttctatcaatgaacaggaaggtatagctacagtcagattcccacccatagactgtagaaagacttcgcaagcgtcagacacattgactattccattgtctagactttgtgttccaagatcagaggcattgcctcttcataaactgtccattactgagaaggtagtacaggcagtccagtccatgttgcttcctcaggagggaagtctctctattcacacctcacttcctgcaacaggagatgggtcagctcctgtgatggcagtcgttcggctccttgctgaaataaggacaagagcatgcctggtcatggcccagcttttagaagacagcttattttgtgaagaattcatacaacaatgtccagcagctgttgaagttcttaacctagtagcccaggaatgtagtgctggagagcgacttgcagttgtggaggtacagtgtgaacggctgaggatgctctaccgggactgtgctcggcccccaccacctcctttgcaggctgaccgaagacagcccaaagagattacttggagcccctcgcgagtgtttccgcctgttcgagcctgcatgttctcatctcaccttacctcagtcaccttcctggctgaccccagcgctgggggaggcctgccccggggcacttttatctatgccacttcaccactgccagttcaggccccgtctttttactgggaaattgaaatcgtttcctatggagacaccgatgatgacaccggacccatagtttcctttggcttcactacagaagcagagaagcgagatggggcttggactaatccagtgggcacttgtcttttccataacaacggccgagccgtgcactataatggctccagtttgttacagtggaagagcgttcgcttagacgtgactctctcccccggtgacgtggcaggaattggctgggagagaactgaggggactccacctcctccgggacagccagccaagggccgggtgtacttcacatactgcgggcagcgcctctcaccatatcttgaagacgtctctggtggcatgtggccagtggttcacattcagaaaaagaacaccaaaacccgagctaactttggctcccggccgtttgcctacgcggaagggcaggcccaccgcaatgctgctgacctgtgcactgacctagcagaagagatcagcgctaactttgaggccctgcctttcgccatggcatctgacagtgacaatgatgctggcaccagtattgcatcagacccaggcactcatgggccaccatgccggattgctgccgtggccaccgctcagcaacaatatgatagtgacacctcctgtcattataaagtcgagctcagctatgagaatttcatcacctctggcccagaccctcacccgcctcccattgcagatgatgaaagcgatgatgatgacgatgatgacatccctcaggaggaccactacgccctgctggtgaaagcatgggagaccaaggtttttcctaccatccgaagacgcttccgcaatgaagcagagcggaaatcgggcctggaccagataaagggggccttacaactaggtatggtggatattgcccgacagacggttgaatttctctacgaagagaatggtggcatcccaagagacctttatcttcccaccattgaagacattaaagacgaagcaaacaagttcacaattgataaagttcgaaaaggtctcacagtagtaacccgctctccagacagcaataatgtagccagcagtgctgttggaactgctctgccaaaatttgccatccgagggatgctgaaaacctttgggcttcatggagtcgtcttagatgttgattcagtgaatgaactggtgcaggtagaaacgtacctccgcagtgaaggtgtgctggtgcgatactggtatcctattgacatgttggaaaggcccccagcaggctaccgaaggactgccaccaatgggctggtcacactggacaataccaaccttcaaattcacagggagctgctgcgctgcgaggctgcgctggccaggctgtactgccgcatggccctgctcaatatcttcgccccgaagttgcctcacttgttcactcgcctcttccacatccctgccatccgggacattaccctggagcacctgcaactgctgtccaatcagctcctcgcacctcctctcccagacggcaccatcagctccagctcgatcctcctggcgcagtctttacagcattgcatccattcccagaactgctccgccacggacctcttttaccagggcaactcccagacagtgagagagtggctcaacgtggccatcacccggaccctgcaccagggcgaggagagccttttagagctgacgaaacagatctgctctttcctgcagacagcaccagagcagttcccctccgaagagttcccaatttccgaatccaaagtcaacatggacgtgaatttccccggggcagcttttgttgttgtgtcttgtaaagaaagtcaatctggattccgcaaagactcctctctgtacaaggcaccgtgggcacgggtgctcgtatatggcctcggccacaaagtgaagcgaaatggccagctgaacctcatcgaggccgcctgttacccgcgggacgcgtccccagccaacactgggcttgcacctccccccaccgctgaccagtacccctctgtggtcctctccacagacagggtccacatcaaactgggggtgtctccacctcctggagcagtcctggtgttacattccctgcccctggagttcccactggctatggccttcgcagagcagctgctgtcctggaaatcagaggacagtgaagggaagtccgaagatgagcctgacaccattccgacatccgtcctcctgcaggtggtggagctgctaggaaacttcttgtggaccacggacatggcagcctgcgtgaaggagcttgttttccatctcctggcagagctcctgcgcacggtgcacaccctggagcagaggcggcaccccgctggcctgtcctcctcaatcgccctccagctgaacccctgcctggccatgctgatggccttgcagtcggagctccacaagctgtacgacgaggagacgcagaactgggtctcaggcggcgcctgcgggggctccgggggggcggcggccggtgaccagggcaggttctctacgtattttcatgcactcatggaagggtgcctggctgtggccgaagtgaccctgcctactaacatgagtgtcacagccagtggggtgacctcagcgaccgccccaaatctcagtgactcgtcctcctcctcctcgtcctccccaggacagaccccacagagtcccagcctcctctccaagaggaaaaaagtcaagatgaagcgggaaaaggcctcctcgtcgggcaagcgccagtcttcccgcaccgtggactcggaccccaccgtgctcagcatcggaggcagcaagcccgaggacatgctgtggttccaccgcgcactcaccctgctcatcatcctccgccacctcaccaggaaggacccacaggggctgggcgtgacgagtgacgccatcgccgatgcctgccaggccctggtgggccccaccgcccacagccgcttgctggtgatctccgggatccccacccacctggacgagggcgtagtcagaggcgccatccgcaaggcctgcaacgcccacggcggggtcttcaaagacgagatctacatcccgctgcaggaagaagacaccaagaagccaaaagacaaggccgagggcggggacgggaaagttgagcccgagaagacactggccttccccggcacagacagcatggaggtcagcacgtccagcagcctgacccccgccatgagcatcagcgcctccgcctccaccagccaggcctccatctgcagctcgcagggcatctcccaaaccgtcagcgacctctctgtggatccgctgcctgccggcctcgagctgcccatccctccgggcctgttggagccccacgcggtgtccagccaggaaagcctggacatttccctgtgcagcaccggcagcctgggcagcctgggcagcctgggggagcccctggacaatgcagagacggcctcggtgtcggacatgggctccatgtacacagtcacttccctggacaaccagcccctcgccgcccgccccatcaaaggcttcgcagtcgtggagataagatcccgagccaaaattgagaaaattcgagcaagtttatttaacaataatgacttgattggtttgtcaagtttggatggtgaagatgaattgatggaaatgtcaacagaagagattctaaccgtgtctgtagtaaatcagagtctctttgatactcaagggagcccagggttagaagattatttcaatgataagtcaattaaaggggagaagctggtgcccggagccagagaggttctgacggagatatttaagagttgtgcccattcagagcagacgctgagcctgacaccagcgaagcccatcagagtctctgacatttatcttagcaaagagcagatcaactcccagaccccaggcaacctcctccacctcttcttcaccaatgtccggccgccaaaaaaggtgctggaggatcagctcacccagatcctgaggaagtatggcgtgccaaagcccaagtttgacaagagcaagtacagcaaggccgggaaggagcagcaccccgtgaaggtggtgagcaccaagcggcctatcaccaagccgcccgccaaggacaaggctgtgctcaacagcgtcaggactgccttaagtgagaagaagccaactgtgaagccaaaatcaccagaaaagagcaaaccagatgaaaaggacccagaaaagtcacctaccaaaaaacaagaagtccctgaggaaaaatacctgacgctggaaggatttcacaaatttgttattgaccgagccaggcaagatatccgtagcgtctggagggcgatcttgtcctgtggttacgatcttcactttgagaggtgcgcatgcatcgatgtccgacatgcacagaaggcctcaagaaagtggaccctggagatggacgtggcacttgtgcagtacatcaaccagctatgccgccacctcgccatcacacccgcacggctccatccccatgaggtgtacctggaccccgcggatgctgctgaccccagagtggcctgtctcctgaacgtgcccatcgagagcctgcgcctgcgcttcgccttgctgcagtccctcaacaccacactggagaccttcttcctgcccctggtggagctgcgccagacacccatgtatacccacagcatcgccgccctgctgaaggaggccaaaggtcagtgcctgcacctgccctggccctgcaggaagagagaggtgacctgcaagacaccagggccagaatccacgggcagcgtccttgggcagccccgccaggaagatgccaccccacctcaacctttcatgtagcaggcagggctcctctggagcaacaggcccacccaagggaagttactttaattataaaagtaacatgctctgaaaaataaaattatttttaaggttttcaaattaattagaaatcatatatgaaggtctgtttactatctggcctccacatccctacatcccagaagtgacattgttaacagatgagtctctctccttccagacttttctcttgacatataaacagacacatgtgtgcacacacacagctt

SEQ ID NO: 7422 - DNA, 2018 bp, Homo Sapiens
  XM_933614
ttgtgttttttgtagagatgaggtttcgccatgtttcccagactgttctcaaactcctgagctcaaagcagtccacccaccttggcctcccaaagtgctgggattacagatgtgagccatcttgctcattctagtttaaacttttgagtggtttgtgtctcctgattggactcctacaaatacagaattgatgctaggaagggtaccaggagatagacgcacacagatgggatttgggaataggtttggttatccaaggagcagtgctgagctccttgctaatgggatatgggatgctgatgatttccaggaagtgacctcacaatgactcaagctaccacatgctgttgattgtgaaatgccagttgaagcatatgtcctgcgagcttaggggtgctacaagttgaccactgcagcagtaaagatgactctgaagaatggcgtgggatggatcctttcgaatgcacttgagcagcggtctccaaccacagggccacagagctggagctggatctaccatgaaagacttctgaatccaggaagagagactgactgggcaacatgttattcaggtgggaccatccagttgcaggaaaacaagcttaacatgcccactgattctacattatgctcctacctcccggcagcatctccaggcccagaactttctccagtcagcctctacagaccaagctcatgactcacaatggcctatttaggcccataccctacctcacggcagtctccgcagatgagcctactgcctcacaacagcctccacaggcacagctccgtcgttacaatggcctctttagacccagctcctgcctcccagccttctctccaggccctgaactttctcaagtcgacctcaccaggcccagctcatgcttctttgcagcctctccaggcccagctcctgcatcttggtgacccctccaggcacagcctctgcctcccgtcggcctctacagtcccaacatctgcctcacagcagattcttcaggcccagcatctgcctcactgtggaccccccaagccaagctcccaacctttcagcagcttctacacacccagctcctgccacccagtggcctctttaggccaagctcatgcttcacaagggtctttccaggcccaatttttgtctcatggcaaccttccctggccagattcctgcctgtctcccagcagcctagacaggcccaggtcttgcctcacactggcctctctacatccagctcatgcctcacggtggcctctccaggctcaactcctgtcccaggacgtcatctccgggcccaaaacttaaagtcagactctctagtcccaactgctgcctcctggtggattatgaaggcccaaaatctcctcaagttgacctctacaggcccagctcctgcctcctgtcagcgtctacaggcccaacctctgccttatgggggcttctccaggcccacctcttcctcttggctgggtctacaggcacaactgctgcctcacaacagccttttttggcccagttcctgcccagctcccagcggccctggtagacccacaacttcccgaagccaagctccccaggcccaggtcaggcctcacggtggcctctccaagctcagctcctgccctccaatggcatctgcaggccccaaatggtctccagtcggtgggctcctccacgccaagcttgggcctcttggcgacctctgcaggcccaagttgtcctgaagtcggcctctcccggccctgcctcccagcaagtaagcaagctcttttggctcaactactgccgagctcccaaccgcctttctaggccccgaactttctccagccaagctcttcgggcctacttcctgcctcccggtggcctgtacaggcccagcactggttggagaacagcctctgcaggccccactcttgcctcccaggggcctctccaggcccagctcttgcccccacggcggcctcccggggccaagtccctgcctgcctcccagcagcccgcatgcggccca

SEQ ID NO: 7423 - DNA, 386 bp, Homo Sapiens
  XM_933693
catgcactgttactaaaaagacgatgcgtcctcctggacctgagatctgtgtgatcgtgggaaagcgacgaaaaacgaacaaaggaacagtaaatggagtaacttggctagaatatggcagtaactacaaggcatgttctgctctggcacgaaggtaaccaccactcatacctctccagccctgtgaatacgtcaattgactaagcagattccttgaggataaagtaggctcctggggaccttgcttgttgggctacttgctttgtggatgttaaacagataattctcatgagtttgagtgacgtctgatctaccagtattccccctactctgattagaaatgacttgaccatgccaaaaagaataaaagacagctctgatacaaa

SEQ ID NO: 7424 - DNA, 4852 bp, Homo Sapiens
  XM_933717
acagattgacttgatgcacaacatcacaaaggcgatttttgagaactgatagtgcatcagccgacccaggtaatttaaaatattcttcatccagagatagaggtggttcttcctcttacggactgcaaccttcaaattcagctgtggtgtctcggcaaaggcacgatgataccagagtccacgctgacatacagaatgacgaaaaggagagatcgatgtcttattgtgatgagtctcgactgtcatatcttcttcggaggatcacccgggaaaacgaccgagaccgaagattggctactgtaaagcagttgaaagaatttattcagcaaccagaaaataagctggtactagttaaacaattggatatcttggctgctgtacatgatgtgcttaatgaaagtagcaaattgcttcaggagttgagacaggagggagcttgctgtctcggccttctttgtgcttctctgagctatgaggctgagaagatcttcaagtggatttttagcaaatttagctcatctgcaaaagatgaagttaaactcctctacttatgtgccacctacaaagcactagagactgtaggagaaaagaaagccttttcatctgtaatgcagcttgtaatgaccagcctgcagtcaattcttgaaaatgtggatacaccagaattgctttgcaaatgtgttaagtgcattcttttggtggctcgatgttaccctcatattttcagcactaattttagggatacagttggtatattagttggatggcatagagatcatactcagaaaccttcgctcacgcagcaggtatctgggtggttgcagagtttggagccattttgggtagctgatcttgcattttctacgcctctacttggtcagtttctagaagacatggaagcatatgctgaggacctcagccatgtggcctctggggaatcagtggatgaagacgtccctcctccatcagtgtcattaccaaagctggctgcgcttctccgggtatttagtactgtggtgaggagcactggggaaagcctcagcccaattcgggccctccaattactgaggcatacgtaacagatgtgctgtacagagtaatgagatgtgtgacggctgcaaaccaggtgtttttttctgaggctgtgttgacagctgctaatgagcgtgttggtgttttgctcggcagcttggatcctagcatgactatacattgtgacatggtcattacatatggattagaccaactggagaattgccagacttgtggtaccgattatatcatctcagtcttgaatttactcacgctgattgttgaacagataaatacgaaactgccatcatcatttgtagaaaaactgtttataccatcatctaaactactattcttgcgttatcataaagaaaaagaggttgttgctgtagcccgtgctgtttatcaagcagtgctcagcttgaagaatattcctgttttggagactgcctataagttaatattgggagaaatgacttgtgccctaaacaacctcctgcacagtctgcaacttcctgagtcctgttctgaaataaaacatgaggcttttaagaatcatgtgttcaatgtagacaatgcaaaatttgtagttaaatttgacctcagtgccctgactacaattggaaatgccaaaaactcactaatagggatgtgggcgctatctccaactgtctttgcacttctgagtaagaatctgatgattgtgcacagtgacctggctgttcacttccctgccattcagtatgctgtgctctacacattgtatcctcattgtaccaggcatgatcactttatctttagtagcctcagttcttcctctccttctttgtttgatggagctgtgattggcactgtaactacggccacaaagaaacatttctcaattatattaaatcttctgggaatgttacttaagaaagataaccaggacacgaggaaactgttaatgacttgggctttggaagtagctgttgtaatgaagaagtccgaaacatatgcacctttattctgtcttccgtctttccataaattttgcaaaggccttttagctgacactctcgttgaagatgtgaatatctgtctgcaggcatgcagcagtctacatgctctatcctcttccttgccagatgatcttttacagagatgtgttgatgtttgccgtgttcaactagtgcaccgtggaacttgtattcgacaagcatttggaaaactgttgaaatcaattcctttaggtgttgtcctaagcgataacaatcacacagaaattcaagaaatttctttagcattaagaagtcacatgagtaaagcaccaagtaatacattccacccccaagatttctctgatgttattagttttattttgtatgggaactctcatagaacagggaaggacaattggttggaaagactgttctatagctgccagagactggataagcgtgaccagtcaacaattccacgcaatctcctgaagacagatgctatcctttggcagtgggccatatgggaagctgcacaattcactgttctttctaagctgagaaccccactgggcagagctcaagacaccttccagacaattgaaggtatcattcgaagtctcgcaggtcacacattaaaccctgatcaggatgttagtcagtggacaactgcagacagtgatgaaggccatggtaacaaccaacttagacttgttcttcttctgcagtatctggaaaatctggagaaattaatgtataatgcatacgagggatgtgctaatgccttaacttcacctcccaaggtcattagaacttttttgtataccaatcgccaaacttgtcaggactggctaacgcggattcgactctccatcatgagggtaggattgttggcaggccagcctgcagtgacagtgagacatggctttgacttgcttacagagatgaaaacaaccagcctatctcaggggaatgaattggaagtaagcattatgatggtggtagaagcactatgtgaacttcattgtcctgaagctatacagggaattgctgtctggtcatcatctattgttggaaaacatcttctgtggattaactcagtggctcaacaggctgaagggaggtttgaaaaggcctctgtggagtaccaggaacacctgtgtgccatgacaggtgttgattgctgcatctccagctttgacaaatcggtgctcaccttagccagtgctgggtgtaagagtgccagcctgaaacattgtctgaatggtgaatccagaaaaagtgtgctgtccaaaccgactgactcttcccctgaggttataaattatttaggaaacaaagcatgtgagtgctacatctcaactgccgattgggctgctgtgcaggaatggcagaacgctatccatgacttgaaaaagagtaccagtagcacttccctcaacctgaaagctgacttcaactatataaaatcattaagcagctttgagtctggaaaatttgtcaaatgtaccgagcaattagaattgttaccaggagaaaatatcaatctacttgctggaggatcaaaagaaaaaatagacatgaaaaaactgcttcgtaacatgtgaagtccagatccaagggaacctcagaaatccattgaagttccattgttaagaagttctgtttgtttggcaactgctttaaacccgatagaacaagatcagaagtggcagtctataactgaaaatgtggtaaagtacttgaagcaaacatcccgcatcgctattggacctctgagactttctactttaacagtttcacagtctttgccagttctaagtaccttgcagctgtattgctcgtctgctttggagaccacagtttctaacagactttcaacagaggactgtcttattccactcttcggcgaagctttacgttcatgtaaacagcatgacgtgaggccgtggatgcaggcattaaggtatactgtgtaccagaatcagttgttggagaaaattaaagtatgatctcgtgaaatcttgagagaaactgaatgacgaatgaaactattgttcctgtttcacacagaagaaaactgaggttggcactcatcatgagcccctgttctcattctgcaaatggtgaagctctctattgtcctgaccccacagttcctgtcccatgaccagggccagctcaccaaggagctgcagcagcatgtaaagtcagtgacatgcccatgcgagtacctgaggaaggtgagtgagtgcagacagatggggcctggtgcccttgagcagttcccgggtctcagctgccacacatctcatagccggtgatgctgggggaagcttacgcagtcacagtactggcttcttcctctttttctttccatacaagtggcttagggatggggtagagtagttgacttatttggatgaaaaccactatcttctgtcagaaactcaaaaggaatcattgctggcatggtaacctaaagaaaaacaaccagacaagtgcccaacgacacttaaaaaggtgatttattatcttgccaagtttaggctgggcatggtgactcatgcctctaatcccagcattttgggaggctgaggctggtggatcaccggaggccaggactttgagaccagcctgaccaatatggcaaaacctcgtccctactaaaaatacaaaaattagccgggcatggtggtgtgagcctgtagtcccagctactcaggaggctgagacaggagaattgcttagattcaggaggtgggggttttagtgggccgagatcacgccattgcactccagactgtgcgacagagcgagactctgtcaaaaaaaaaaaa

SEQ ID NO: 7425 - DNA, 5023 bp, Homo Sapiens
  XM_933834
ggtgactcaagtgcccattcaatgaccaggacacagaggtcttagagagatgctccttgaggccccaggtgcgagcctgtaccctgccggagcatgaggcaagggacagggcatcgtctgtggggatagtgggggtagtgggggtagtggtcagccagatttggtgactctacttgctcaccagacgatcctacacctgccacctccgatggatccactgcctctgtgcctgcctgtactgctgatgctccagtggataactcagcatcccagcctaggcccaatgccactgaagatggacctgccccctggggacccaggagtcctaccactcagctgtccccaggagtgcccagaccctcattcttatccaggacctaggagccctacccctggccttccctcatcagccgtaaatgatgatttactgctgttaccatcatcactgccttcagtgaccaagggccttccaaggtgccagctctggaacgaaggatgcccttgggaggtgatgacactcaggtacacgggtgctcagcagattgcttcctcctatcctcagacggtctttgcatgcatgcagccattggcactcccattgtgtggaaggaaaccagcccagggtcacacagctggtcagcagcaacatagctggtctcaaatctaaggtgcctgaccatgcctccatgagggaccgcctccaagggaggttgatcctggctttggggagcctttcctgggctgcacgaataacctccattgttcgagaccccaaactctgctcacatcttcctttccctatctctgcttgggctatgatcacggtgactctagcagcccttcatggacattatagtactctctgccattcacttttgctctaatctgacttcaacccccacttacttggtctctccttttacaaccaccacaaccgaaatctagggctgcttttttttttttttttttttttgagacagagtctcattccattctgtcacccaggctggagtgcaatggtacgatctcggctcactgcaacctccgcctcccgggtccaagggattgtcctgcctcagcctcctgagtagctgggattacaggcgtgtgccaccatgcctggctaatttttgtatttttagtagagacggggtttcaccatgttggtcaggctggtctcgaactcctaacctcgtgatccgcctgcctcagcctcccaaagtgctgggattacaggcgtgagccaccatgcccagccaaatctagggcaggaacatggctgcagcatataaaaagaattgaattccatacttttgttaaccctgttttttgtttgtttgtagttgttgctgtttttgagacagagtctcgctctgtcgcctaggctggagtgcagtggtgcaatctcggctcactgcagactctgcctcccgggttcaaactattctcctgcctcagcctcccaagtaggtgggactacaggcgcccaccaccacacccggctaatttttgtattttattagagacagggtttcaccatattggccaggctggtctggaactcctgaccttgtgatccgcccacctcggcctcccaaagtgctgggattacaggcgtgagccaccacacccagcccctgttttgtttttgttttgcttgcttcttagggttgtttttctatttatggtaaaggcattggctttccatttgtagcatcaatagaatatttcctgtttacaataaccttatgtcatagtaaatggtaaagggatttaaagcagtggttttcagctgccagaggcctgagagagtttgggcatactctgtgtgatcgggcagaaggcctgtgggaagtttagcagaggacagggccaggaaaggtgatggacagtgggggtctgtcctggtcaccaggcccctgggtcctgcccacctgcttggagctccccacccatcacacatgatgctgccaagccctctgggtattgtgggcaaataccttaggagagaagctgatgaactttgtttcttgaaatgcacagattccttggacgtccctgagagctcagtcatgaaagtcaacttggttttctccccctcatttgggttcagaatttaaagtccacacacacaggcagtaagatgatatagataaggacgtcatcactcggtttcggatgttaaaatgtctaggtgggttagcggtgatttgagatcacacaaccttgtgccacaaagaggaattcccaggccagagggagacattttattgccatgttatgatctcattattgagttgaaaggcaatcttgtttcattttggattctttcttatgtttatgtcttataagggcactttgaatttccaagcaaataataattttgaattagcttttaatcattgacttctagcacagttatatgatcagaaacatgctgtgtgatttgattgctctcaaatatattgagatttgctggaacaaaataagtcaggttaatttttgtaaatgtaccaggcatgcttaaaatgaatgtatctacatttgttcctgagatacaggttgatggacggatggctacatggatgtgatggagatggtttactatcgggaccttccgcaccctgctgatgttttgttgcttaggatatgaatggctgagcggaggctgtaaaacctggcactctgcttgggttatcaatactctggctgaccatcatcatcgtgggactgactttggtggaagtccttggttacatgtcattattgcgtttccgacaagttataaagttgtcattaccctctggatagtttacctttgggtgtctctcctgaagactatcttctggtctcgaaatggacatgatggatccacggatgtacagcagagagcctggaggtccaaccgccgtagacaggaagggctgaggtccatttgtatgcacacaaagaaaagagtttcttcctttcgaggaaataaaattggcctgaaagacgtcattactctacggagacatgtggaaacaaaagttagagctaaaatccgtaagaggaaggtgacaacgaaaatcaaccatcatgacaaaatcaatggaaagaggaagaccgccagaaaacagaaaatgtttcaacgtgcgcaagagttgcggcggcgagcagaggactaccacaaatgcaaaatccccccttctgcaagaaaggctctttgcaactgggtcagaatggcggcagcggagcatcgtcattcttcaggattgccctactggccctacctcacagctgaaactttaaaaaacaggatgggccaccagccacctcctccaactcaacaacattctataactgataactccctgagcctcaagacacctcccgagtgtctgctcactccccttccaccctcagcggatgataatctcaagacacctcccgagtgtgtgctcactccccttccaccctcagcggatgataatctcaagacacctcccgagtgtgtgctcactccccttccaccctcagcggatgataatctcaagacacctcctgagtgtctgctcactccccttccaccctcagcggatgataatctcaagacacctcccgagtgtctactcactccccttccaccctcagctctaccctcagctccaccctcagcggatgataatctcaagacacgtgccgagtgtctgctccatccccttccaccctcagcggatgataatctcaagacaccttccgagcgtcagctcactccccttccaccctcagctccaccctcagcagatgataatatcaagacacctgccgagcgtctgcgggggccgcttccaccctcagcggatgataatctcaagacaccttccgagcgtcagctcactccccttccaccctcagctccaccctcagcagatgataatatcaagacacctacacctgccgagcgtctgcgggggccgcttccaccctcagcggatgataatctcaagacaccttccgagcgtcagctcactccccttccaccctcagctccaccctcagcagatgataatatcaagacacctgccgagcgtctgcgggggccgcttccaccctcagcggatgataatctcaagacaccttccgagcgtcagctcactccccttccaccctcagctccaccctcagcagatgataatatcaagacacctgccgagcgtctgcgggggccgcttccaccctcagcggatgataatctcaagacaccttccgagcgtcagctcactccccttccaccctcagctccaccctcagcagatgataatatcaagacacctgctgagcgtctgcgggggccgcttccaccctcagcggatgataatctcaagacaccttccgagcgtcagctcactccccttccaccctcagctccaccctcagcagatgataatatcaagacacctgccgagcgtctgcgggggccgcttccaccctcagccgatgataatctcaagacacctcccttagctactcaggaggctgaggcagaaaaaccacgcaaacccaagaggcagagggcggctgagatggaaccacctcccgaacccaagaggcggagggtcggtgacgtggaaccgtcacgcaaacccaagaggcggagggccgctgacgtggaaccatcatcacccgaacccaagaggcggagggtcggtgatgtggaaccgtcacgcaaacccaagaggcggagggccgctgacgtggaaccatcatcacccgaacccaagaggcggagggtcggtgacgtggaaccgtcacgcaaacccaagaggcggagggccgctgacgtggaaccatcattacccgaacccaagaggcggaggttgagctgagaagaggccagtgcactcaagcctgagcaataagaataaaaccgagtagaacaaaataaaaaattcaaaaaacaaaacaaaacccacactccaaaaactaacaaagaataaataaataatataaaaataaaataaatactgcagtccttatgtta

SEQ ID NO: 7426 - DNA, 913 bp, Homo Sapiens
  XM_933893
cacgctacctacagaggggtccatacggcgttgttctggattcccgtcgtaacttaaagggaaactttcacaatgtccggagcccttgatgtcctgcaaatgaaggaggaggatgtccttaagttccttgcagcaggaacccacttaggtggcaccaatcttgacttccagatggaacagtacatctataaaaggaaaagtgatgagggctgtgctgaagtttgctgctgccactggagccactccaattgctggctgcttcactcctggaactttcactaaccagatccaggcagccttccaggagccacgacttcttgtggttactgaccccagggctgaccaccagcctttcacggaggcatcttatgttaacctacctaccattgctctgtgtaacacagattctcctctgcgctatgtgcacattgccatcccatgcaacaacaagggagctcactcagtgggtttgatgtggtggatgctggcttgggaagttctgtgcatgcgtggcaccatttcccgtgaacacccgtgggaggtcatgcctgatttctgcttctacagagatcctgaagagattgaaaaagaagagcagcctgctgctgaaaaggctgtgaccaaggaggaatttcagggtgaaaggactgctccagctcctgagttcactgctactcagcctgaggttgcagactggtctgaaggtgtgcaggtgccctctgtgcctattcagcagttccctactgaagactgcagcgctcagcctgccacggaagactggtctgcagctcccactgcccaggccactgaatgggtaggagcaaccactgaatggtcttaagctgttcttgcataggctcttaagcaatatggaaaaatggtggatggaaaataaacatcagtttctaaaaaa

SEQ ID NO: 7427 - DNA, 138 bp, Homo Sapiens
  XM_933970
atgtctggaaggcaatctgcccctggaggtggtagcaagattccacaggataaagtaaaacttactgctgatgaaaatgatgatgattttgatgatgaggaaactgaagaaaaagctccagtgaagaaatctacatga

SEQ ID NO: 7428 - DNA, 2479 bp, Homo Sapiens
  XM_934138
cacagtgatctagtgtctgacttttctagggaatccaatcaataaaattgaagactggctgcaggattgcggctccttggaaaatgtagtaagtgacttcaacctataagactgtttttggtttagatactctgaagaaggattttctgaggaagcaggacagtttatctacaatggcttctgcagccatgggaccagctttgaagatgacttgaccctgggagcggaggccacactactggccgccaatggcaaactcttctccaggagtttcctcgagacagccaggccttgccagctacttgatcttggctgtagtttggcttccagcagcatgactggggggaccaacaagactagttcaagcatctcagaaattctggacaaagtgcaagaagatgcagaagatgtcctcttcagtctgggctttggccaagaggatcacaaagacacttctcggatacccgcccgatttttcaccaccccctctcaggccaagggcattgatttccagctcttcctgaagtcccaggtgcggaggattgaaatggaagacccctgcctcatgctggccagcaggtttaagcaggtgcaaacactggctgtcactgctgatgccttcttctgtctctactcctatgtgtctaagacacctgtccaaaagttcacaccatcccacatgttctggaattgcaaccatccaactgatgtgccatccatcaggattctgtcccgagagcctgaaccccagtcacccagagaccgccttcggaaagccatctccaagatgtgtctgtacacatgcccccgagaccggccaccaccaccccacaacacccccaaaaggaacagtttggaccaagttgtgttggaagtgatggacaaagtgaaagaagagaagcagttcctccagcaagactctgatttggggcaattctcacaggaagatcctgtgccccctgctgagggtaagaagttgcccacttctccctatccatgtgtcttctgctgtgaagaggaaacacagcagaggatgtccacagtgctagcaccatcccaaactctggattcgaaccccaaggtaccctgttgcacacattctctgcccatagaagatccacagtggagcacagacccagctcagataaggagagagctgtgtagtctaccagccaccaatacggaaacccatccagccaaggatgagactttctggaaaagaaagagcagagcaagaaagagcctcttccagaagaatctcatgggcaggaaggttaagtccttggacctgtccatcacccagcagaaatggaagcagagtgtagacagaccagaactgcgtcggtctttaagccagcagccacaggacacttttgacttggaggaggtgcaaagcaacagtgaggaggagcagagtcagagtcgctggcccagcagacccaggcacccccaccaccaccagacttttgctggcaaagactcgtgaagctttctccaccaccacaacagcatgtggtctgacagaattggcttcaaagaagaaactaaaagccacctcttgcaggaaactgcactgccctcaacatccagcccctactccttggtcctccaaacccccaaactctgcaggagaaaggcagcatggtacatggggaggaagaccagactgagcgatttggaatccacatcctaatgctgccacaagctgcatgcacaaagaccttaggcacatctcttcatttctctgtacactggtttctctactatgtgtgtattaaaatatataatgtggatgatagtaaactgaacaaagccttaattttctcccaagctttgacattgccaagggcagttaggagacttcaggatcaagtttaggggacaagtttttttctaatactttcaaaaggcccaagtgaagagaggaaggacacctcactttctggctctaaaagcatggtacatctcacactaggattccctctgcacctctgttcatccctgtattcctaactaaattccagaaaatcttctacaacactggagtcctatttttcttcttgagacctcctttgaagaaatcaacttggagactcctccttaaatccagtttctttctctacccaaaattttgcatctttatagaaaaagagataagtaggattcagagtctcttctcctagccattgtggggggaaaaaatgctatttctgttggcagaaaacaatacaaatattttttttaaatcatggcatgtttttaaagttaactaacagctgtagtttgctttggaagttaaatgttttgtcaataaacagggcttgagcacatgcagtgctctcttaggcagtatgtggtttcagagcatcttggacacatttctcccctgagaaaatattaatattaatagaatgggagaagtaagatgcacgcatttccagaagtatattatttggctgcctaataaattgtgagacaa

SEQ ID NO: 7429 - DNA, 839 bp, Homo Sapiens
  XM_934176
caaatggcgtgacgccggtgcagttggggggcccggaggccctggtggccctgggatggggaaccgcggtggcttccgcggaggtttcggcagtggcatccggggccagggtagcggccgtggactgggcctgggccagggccgcagagctcgcggaggcaaggccgaggataaggagaatcagagatcattgactttttcctggcggcttctctcaaggatgagattttgaagattatgccagtgcagaagcagacccgtgccggccagcgcaccaggttcaaggcgtttgttgctgtcggggactacaatggccacgtcggtctgggtgttaagtgctccaaagtggtggccaccgccatccgtggggccatcatcctggccaagctctctattgtccccgtgcgcagaggctactgggggaacaagatcagcaagccccacaccgtcccttgcaaggtgacaggccgctgcggctctgtgctggtgcgcctcatccctgcacccaggggcactggcatcgtctccgcacctgtgcccaaggagctgctcatgatggctggtatcgatgactgctacacctcagaccggggctgcactgccaccctgggcaacttcaccaaggccacctttgatgcaatttctaagacctacagctacctgacccctgacctctggaaggagactgtatttaccaagtctacctatcaggaattcactgaccacctcgtcaagacccacaccagagtctccgtgcagtggacccaggctctagctgtggctacaacatagggtttttatacaagaaaaataaagtgaattaagcgtgaaaaaaaaaa

SEQ ID NO: 7430 - DNA, 5520 bp, Homo Sapiens
  XM_934248
gtgaatttccgtttccggtggtgtccaatccgacctgaggagtcacagttgtgagcaaattagaattacttgttattggtaaatagccactatggagactaaggaccagaagaaacaaagaaagaaaaatagtggacccaaagctgcaaagaaaaagaagcggcatctgcaggatctccagctaggagacgaagaagatgcctggaagagaaatcccaaagcttttgcatttcagtctgctgtgtggatggctcgatcctttcacaggactcaggatttgaagacaaaaaagcatcatattccagtggttgatcgaactccactagagcccccaccaatagtggtagtggtgatggggcctccaaagttggaaagagcactttgatacaatgcctcattcggaacttcacccggcagaagttgaccgagatcagaggccctgtgatgatcgtgtcaggtaaaaagctccgactcaccattattgaatgtgggtgtgacattaacatgatgattgatctggctgaagtagcagatctggtactgatgcttatagatgccagctttgggtttgaaatggaaacgtttgagtttctaaacatctgtcaagtacatggctttcctaaaattatgggagttctcacccacctcgacttcttcaaacacaataagcaactgaagaagacaaagaagcgattaaaacacaggttctggacagaagtttacctggttgccaagctgttctgcctttctggaatggtgcatggagaatatcaaaaccaagaaatgcacaatctgggccattttattacagttatgaagtttaggcctctcacatggcagacttctcatccttatatcctggcagacagggtggaagatttgacaaacccagaggatatccaaacaaacatcagatgtgaccagcagatgttactttacggttatttaagaggagcgcacttgaaaaataaaagccaaattcacatgccaggacgaggtggggcccacccatgagctggtccagagtctcatctccacccactccaccattgatgccaagatggcttcaagtcgagtgatgttgttttctgattccaagccacttgggtcagaggctatagataatcaaggggacgagttctcactatgttgcccaggctggcctcgaactcctgggctcaagcaatcctcctgcgttggcctcccaaagtcctgggattacaggtgtaagccactacggctggcctattattgctgtattctaacttattcatctcctatgtgtcagagatggctttggattccccgttctgtgtgctgctgtctggctcctgaacccagctgtagaggtgtgtcaatcccaactggtgaagtactgagaggaagctacacaaaaggcagcaaagtattagtgagtggtgtcattgagcaaacacgaagtcgggctcatccaaggatgagattttgccagagaaaggacgagcagcaagtcagggagcttaaggatggagtcttgctctgttgtccaggcaggagtgccatggcacgatcttggctcactgcagtctctgcctcttgagttccagtaattctcctgcctcagcctcctgagtagctgggattacaggcatgcaccaccacacccagctaatttttgtatttttagtagagacaggatttcactacattagctaggctggtctcaaactcctgacctcagttgatccacctgccttggcctcccaaagtactagggttacaagtgtgagccaccatgcccagctgagatctgatggttttatacatgtttgacagttgctccttcacatgttgccactctctgtgcggccaccatgtaagtcggacctgcccttctgccatgattgtaagtttcctgaggcctccccagccatgtgaaactgagtcaattaaacctcttccctttaaaaattacccaacctcaggtatttctttatatcagtgtgaaaacagattgctatactttctgataatcatgcttaagcaattggggaattcagactacctgggatcaaaccagggccccacccttagcagtcatgtgaccttggggaggttacttaccttctccgtctcaacaacttctgtaaaatctgtaacatgagattgtttctgagggttaaatgagcatagcacagtggggacactgtcaggcacacactacttgccagatgtcaagtattcatctttattgaaataggactgtggtaagccactttatggctctcgattctgtatgagaaaatcatgcttagtgccttgttagtaaaagaaagaaaatctgaaagtccctgccatggaaggaagaaatagcggggagaaaagggagttggtaagtttcagcatttcagagcttggagggacaagttaggtttctattttatggagaaggaggtggaggcaggatgggtcctaaggtgtcattcaaaacacacagccataactctttattgagagtagagctagggccgcagggattgctgtggtcacgttgcggacaaaaatgaccactcgttggaagacaggagaggagtgtttagttacaaaagcagtcaacaattcaggtgtatctatattcagtcagcaaataaaagttgttcaacttggttgctaatgggacccactctactgaggctttgtatagaactcatagaggaagatggcttcaagcaatgaactaccctgtgcttttcttaggactaaaatctcaggaagttggtgatgaatgaaaaccttagtcccactggcactgcacgaggggccaggagagcagcagcatcataagccacagggtggggcagccaaggcaggggcattctgagctgttggggaggggtggcaggcagggtggggcactgtgaggtgtcggggagggcattgtgaagtgtggggtggggcattctgtgccacatgcctgggctcccacctggggccagtgggcttcagtctgtaggtgactacagaaggaggaggagctccgtctgttctctcttcaggcagttgttgtgtctctcagcgcttgttgggttcacaacctattaaataagccagctggtcttcaccctcccagacaagtcaactcaggggaggcagcagggtgtgggccttgacccgcagccctagccggggccggggccggggccagggatggtgcccggggccgcgctgtgaggtgggcaggcgaggagcgggaagaccatctctgcaagtgcagcatagcctcggcctaggacagtgggagtgtgtggccaaagctgtgagcagaggcacaggtggtggcagacagtagaggcgccccatggggaacatactgacctgttgtgtgcaccctagcgtcagcctcgagtttgaccagcaacaggggtcggtgtgtccctctgaatctgagatctatgaggcaggagctggggacaggatggcaggagcgcccatggctgctgctgtgcagcctgctgaggtgaccgttgaagttggtgaggacctccacatgcaccacattcgtgaccaggagatgcctgaaggtaaggaggtgataggtgccatctaccctcggtttgcctctggctgctgctgtccccaaggttccctttacggcatcccccactttgagctcctttctgcttgtagccagctttcccgggggctggccaggaacaaaagctggctctgccttgaattcccaccccttagtctttcctcaccgagtccagtcagtttcttttcgcctcccctcccaatcgcccagttcttgctctctcatctcattctcccaggctggcatgggaccatttatttatggctcttgtcaaataagcagcagttgaataaatgagttgataaatttttataaatgattacatcttttttcttttctccctctatacatatagctttggagtttagcctttctgccaatccagaggcaagcacaatattccagaggaactctcaaacagatggtgagacaacagtgtctgtagctctgtttattatcctgtgggactttgtttaggcttctttgagctattctcttccttttctcaataaaaactcaaatatcccaacttttcagtacccatcttattttttctttgtacctatccagatggtacctaagtgaaggaaccaggtaagtgcctaattgtttcctttgttaaagtagccaaatctcaggacagttcctattcaaatatttgggggtttcttatttaaaatcagaatggaggttgccacgggagaggctatatggtattcttaatgggctgctttaagtcaccttgatagaagctgcttagtttcttctaactgtaatttgaacacagaaggaaaaagaaaaaagagtgcttaaaataattgtgaaaggtgtgaaatgtcacagccggggctgcagaaaaatggttgtgtgtgtgtgtttggggtttctcaaaggagtttacctatgaggctctgattactttaaaattcttactttaacagaaaatgtgtctccagatttatgctggtgacttaacagactttatttacctccttgttctaaaagagaggtggggattggttcatggtcaacactttcaaaagacatgaaatgtcaatgtagacttttaatatgtaatataaagattgcaggttaaaatgtcagaccttccctgtaagagtgtttgttgccgtggctccccctttgtcccttcccctcctgacaatagcatcttgttcaaagataagaaagttacagttttggctgggcttggtggctcacgcctgtaatcccagcactttgggaggccgtggcaggcagatcacctgaggtcaggagttcgagaccagcctggccaacatggtgaaacgctgtctctactaaaaaaaaaatacaaaaattagctgggtgtagtggcgcatgactgtagttccacctactcacaaggctgaggcaggagaattgcctggacctgggaggtggaggttgcagtgagcagagatcacgccaatgcactccagcctgggtgacagagcgagactccgtctcacaaaaaaaaaaaaggaaagaaagttggagttttttagtctctacactgctggcagaggcaggggatgggagctggtagaaaagagaaaacaattagttggtttgcctctaaaattttgcaaagagatgaatctaagtaaaagtaattctgggtaataatatggttcttgaataaaaactgaaattttcaaaatagaaaacattgcatcataaacatattaaatccagttggcttattggtttcatttaaatgccagagatttcattactgtagaggaaatgtcttatagctcttctatttaaactttggttgggctcttaatttttaaagaggtaggataattaagactcattatgagtgtgactttgtaacttggaagtactatcttcacatttcaagatatttaaggattgctttagaataaacaaatgtattatgtgaattaattgattgtacc

SEQ ID NO: 7431 - DNA, 2230 bp, Homo Sapiens
  XM_934316
cgcttcccggaagtgacgcgaggacccgccttctctctcggcgtttccgctgtcagggccctgcggtgtgactcgcgggctcagctggtccggccgtagcacctccgcgccgtcgccatgtcgcggtttttcaccaccggttcggacagcgagtccgagtcgtccttgtccggggaggagctcgtcaccaaacctgtcggaggcaactatggcaaacagccattgttgctgagcgaggatgaagaagataccaagagagttgtccgcagtgccaaggacaagaggtttgaggagctgaccaaccttatccggaccatccgtaatgccatgaagattcgtgatgtcaccaagtgcctggaagagtttgagctcctgggaaaagcatatgggaaggccaaaagcattgtggacaaagaaggtgtcccccggttctatatccgcatcctggctgacctagaggactatcttaatgagctttgggaagataaggaagggaagaagaagatgaacaagaacaatgccaaggctctgagcaccttgcgtcagaagatccgaaaatacaaccgtgatttcgagtcccatatcacaagctacaagcagaaccccgagcagtctgcggatgaagatgctgagaaaaatgaggaggattcagaaggctcttcagatgaggatgaggatgaggacggagtcagtgctgcaactttcttgaagaagaaatcagaagctccttctggggagagtcgcaagttcctcaaaaagatggatgatgaagatgaggactcagaagattccgaagatgatgaagactgggacacaggttccacatcttccgattccgactcagaggaggaagaagggaaacaaaccgcgctggcctcaagatttcttaaaaaggcacccaccacagatgaggacaagaaggcagccgagaagaaacgggaggacaaagctaagaagaagcacgacaggaaatccaagcgcctggatgaggaggaggaggaggacaatgaaggcggggagtgggaaagggtccggggcggagtgccgttggttaaggagaagccaaaaatgtttgccaagggaactgagatcacccatgctgttgttatcaagaaactgaatgagatcctacaggcacgaggcaagaagggaactgatcgtgctgcccagattgagctgctgcaactgctggttcagattgcagcggaaaacaacctgggagagggcgtcattgtcaagatcaagttcaatatcatcgcctctctctatgactacaaccccaacctggcaacctacatgaagccagagatgtgggggaagtgcctggactgcatcaatgagctgatggatatcctgtttgcaaatcccaacatttttgttggagagaatattctggaagagagtgagaacctgcacaacgctgaccagccactgcgtgtccgtggctgcatcctaactctggtggaacgaatggatgaagaatttaccaaaataatgcaaaatactgaccctcactcccaagagtacgtggagcacttgaaggatgaggcccaggtgtgtgccatcatcgagcgtgtgcagcgctacctggaggagaagggcactaccgaggaggtctgccgcatctacctgctgcgcatcctgcacacctactacaagtttgattacaaggcccatcagcgacagctgaccccgcctgagggctcctcaaagtctgagcaagaccaggcagaaaatgagggcgaggactcggctgtgttgatggagagactgtgcaagtacatctacgccaaggaccgcacagaccggatccgcacatgtgccatcctctgccacatctaccaccatgctctgcactcgcgctggtaccaggcccgcgacctcatgctcatgagccacttgcaggacaacattcagcatgcagacccgccagtgcaggtaggatggggaggccttggaggtgaaggagtgccaggcccctggcctcttggcaaactggcttaaccagaacagccacctgtctggccggtgcaaatttaagtagacacttggtctttcccagttgccagcatcctgcagtcctcctgcatgtaaacacataatttcgtgtcaaaaaaaaaaattatccaggcttggtagtgcttgagcccaagaggcagaggttccagtgagccgaggttgtgccactgcactccagcctgggtaatggagcaagactgttcaaaaaaaa

SEQ ID NO: 7432 - DNA, 1466 bp, Homo Sapiens
  XM_934471
tcaactcttagcttgttggggacggtaaccgggacccagtgtctgctcctgtcaccttcgcctcctaatccctagccactatgcgagatgactccttcaacaccttcagtgagacgggtgctggcaagcatgtgccccgggctgtgtttgtagacttggaacccatggtcattgatgaagtttgcactggcacctaccgccagctcttccaccctgagcagctcatcacaggcaaggaagatgctgccaataactatgcccgagggcactacaccattggcaaggagatcattgaccttgtgttggaccgaattcgcaagctggctaaccagtgcactggttttcagggcttcttggttttccacagctttggtgggggaactggttctgggttcacctccctgctcatagaacgtctcttagttgattatggcaagaagtccaagctggagttctccaattacccagcgccccaggtttccacagctgtagttgagccctacaactccatcctcaccacccacaccaccctggagcactctgattgtgccttcatggtagacaatgaggccatctgtgacatctgttgtagaaacctcaatatcgagcgcccaacctacactaaccttaaccaccttattagccagattgtgtcctctatcactgcttccctgagatttgatggagccctgaatgttgacctgacagaattccagaccaacctggtaccctactcccacatccacttccctctggcgacatatgcccctgtcatttctgctgagaaagcctaccatgaacagctttctgtagcagagatcaccaatgcttcctttgagccagccaaccagatggtgaaatgtgaccctcgccatggtaaatacatggcttgctgcctattgtgccatggtgatgtggttcccaaagatgccaatgctgccattgccaccatcaagaccaagcgtagcatccagtttgtagattggtgccccactggcttcaaggttggcatcaactaccagtctcccactgtggtgcctggtggagacctggccatggtacagagtgcatgctgagcaacaccacagccattgctgaggcctgggctcgcctggaccacaagtttgacctgatgtatgccaagcgtgcctttgttcactggtacgtgggtgaggggatggaggaaggcgagttttcagaggcccgtgaagacatggctgcccttgagaaggattatgaggaggttggtgtggattctgttgaaggagagggtgaggaagaaagagaggaatactaatccattccttttggccctgcagcatgtcgtgctcccagaatttcagcttcagcttagctgacagacattaaagctttctggttagattttcatttggtgatcatgtcttttccatgtgtacctgtaatgtttttccatcatgtctcaaagtacagtcattaacataaaa

SEQ ID NO: 7433 - DNA, 3424 bp, Homo Sapiens
  XM_934508
tatagcagcatgatttgggtacctacccagtaatgggatggctgggtcaaatggtatttctagttctagatagaatgtttcctcttataactcatagtgaatatgactggacaatgaaactattttgtaatttctttcctgaaagataaaggcgttagaacatagaatctttcattgattctacagaatcttaagactccttcagagatggcagtcattcgtaccgtgctgaacatcatgttgtcacggtcagaatcagaactaaattgattaagggtctgaaacagtttggcactcttgggcacttattctgataagaaagctgatgagacagggtaatgaaaagaggctgcaagaaatgaccattcatgcattcagccaacatttaggccaccctcctgtattccaggcactgtacgtggcactgagaatgcaaagcaaaacgagtcatggtctactggcgggagccttctcagcggagaaaagaccaataagaaaagtgtctgctggagacctctcctagggcataaaccaatatagaggtggggcagctacgtcaccctgaggtgtccttaggcagaacagaaagtgagaatcagagcagtgtctcatttctgaacacctggattgtagctttccctggactgactgtcaaaggaggtggttttaaaaagcaagccaaacaggtttccatcctttaggaagaccctggaatgtgccagttgattctgacaatttctcatgaacagaaacacctaggaagggagaactggtgagtcttttcaagaggaggaagtccctcaaaaggggctgtgtttcgcaaacagcgccccaaaagggctgaaatacttcgatctggaggaaaaagactcaggcactgagggaaggggagggtgcacatctggagtaatttcaaggctttttccgtgttatctgaggtggcaacaagtaaagatttgttcgttttattatttttttaatttttaaagattttcttttccccccttttccccctcccggccactccggtttgtgtttgccacaagactcataattcctttagaaagtggagtcgaattcataaaagtgatggggggagagcgcggagagggaaggctgggagccccagggagtcttcactacctacactgccgctcagctcccggcgcgagtggaggtcggggtggggagacgcgacgcctgcctgggatggctgacactctgcgagccccggcggcccgcggccgggccgggtgactaggcggagggcgcggagggtccgcggcgggcgggtggcgctgcagcagcctgggcacggctgccgccgcccgcgggcgagagtgtgcacgggtgtggaaggccggagtgcgggccgtgaggggtgtgcgcgcttgagccggagcggggctcgcccctcgtcggctcccgccgcccagccggtgatcgctctccggccgtccccggcaccctcggtcccccacggcggttggtccgggcgggggaaggagaaagtgagactcggtttcatcaccaatccatcgccagaaggggaggaaattggaatccagcagcggcgagcagcagctgggcggtcacatctggaaatggaaagccgacctccccctcctcctccacctcctcctcctcctcctcctcctcctcctcctctcacccaggatcacttccgaaaccacttggccttcagcccctgcctcggccagaggtttcatttttaactgaatatttacgaaagctgaaagcgtgcgaggggggtggggtggaaatagcggctgcttcttttccaaggatttatttaatggggatgtgttcaaggcaagaccgaattcagaaggatatcgacgtcgtgatccagaagtccagagctgaggactgcctgtttgcaggttctgattctacttccaccacaagcttcagcatggcagtatctgccaccacttgttttggtccaagggcagaaatgagcatcctggaaaccaatcagtacttgcgctctgaactggaaaagtgcaaacagaacttccaagacctcacagagaaattcctgacatccaaagctactgcctactgcctggccaatcacctgcagaaatgtagatacatgatcccttaattcaggctcaggctgaagaactgacccacttacaacagaagatacaggaagggagaggtgtctgctaccttttcacccagcatgtgaagaacacagtcaagtcttttgagggccttctcaggaacactgacattgcctactaccagagacagagattctgtgagcaaatggtacaaggaagccagctgacagagatccttgtcagaaaacttgccacagaaaatcacaatggtaagaaaaatgaagacaggcaaaagccactggctcccaggcacactttactcccagtcaaaagtggactgtatacttcctctttgatgtgatggtccctttggttttggtgcctcttccatgagcttcagatcagaactagctatgtggttccaggctgccttggtttaatcccttgtcttgcctacttcacctggctcaagagggaagtccaggaggaagaaatggatgaagtcctggagtactcactagatgaacagtatttgactcattccagctgccatgactcccaccagcttcccagcagcaatgccttcctctttgatgcacaggaaggcccctcggctgtggaaacagccaaagatgagatccagagccagtggcagcacctgaaggagacccttttcatcaacaactgcctgtgagaaaagctagaacgtcatcacagcagctttgatgaagaaaatggatgcacctctaacctctacaggcaaatcatagattccattgtccagctgtataatgaaaacagagttctcagagaagaataccggagactcccccgacttgcctgaatcaaatttccagaggtaagtggtgaaaggccacaatatgaagtcactctcagatgggtcccttctcttgccacactccactgtagaaataaaagaggacggggaggccagagctgctcaaaaccttataacccacaattctcatagctattctcaacttagagagggctgctttctagacacaccccctccaggcccccagactgccaggctccaggaataagtagctctaagaaatacagtatttcggtgcgagccacaccccactattgcaaattggagaagagaaggacaaacttaaaaggtgaaaagatttaacagaacaacagggtgaaaccccatctctaataaaaatacaaaacttagctgggcgtggtggcatgcacctgtagtcccagctactcaggaggctgaggcaggagaatcatttcaacccaggaggcagacgttgcagcgagccaagtttgcgccactgcattctagcctg

SEQ ID NO: 7434 - DNA, 1171 bp, Homo Sapiens
  XM_934629
gactgtgtcactactttgtggaatgttattttagaacttccagaatgcctcagtaaatcctgactgccatgtaactgtgtactgtgctgctgagctcttaacatgaagcagcagcagtgaccctggcgggccaggctgacgtgcgtgggaacagtgggagtgaccctggctgggaagcagggaggcctggatattgtttctcctggctctgtgtcctgccattctcatccctgtgctcagagctctcaagcacccacgatggccttctcaggccgagcgcgcccctgcattatcccagagaacgaagaaatcccccgagcagcccttaacactgtccacgaggccaatgggaccgaggacgagagggctgtttccaaactgcagcgcaggcacagtgacgtgaaagtctacaaggagttctgtgacttttatgcgaaattcaacatggccaacgccctggccagcgccacttgcgagcgctgcaagggcggctttgcgcccgctgagacgatcgtgaacagtaatggggagctgtaccatgagcagtgtttcgtgtgcgctcagtgcttccagcagttcccagaaggactcttctatgaggaacgaacgtgatggttaagctaccttcattaagcagcatgaccgcttcctgagctcctgctgccgcatttaggccctgtcagctgtgaggccactggtgctgagtcagagggaaaagctcagaacagccttgagcagcgaagaataaagcatgactcatctcgtcctgcccacccctcacactggactataaataccctccctgggtctgtgtgctgttattccaaaagatgcgatgaatacccagaactaggctattcatgggctgttgcccagttcaagctctattgggtcctgaggaagattactattttggctacattgtttatcattaaaaccagcccagggatgtgtaaacctgcatctggagaataagacatttctttttggttaaatgatattagagaaaaaaaaaactatccaaggctgctaacaaataatcttcactttcaattatatccagcaataagttgttctccagaaaagaaagcttggaaacttacccagtttgccttccatttgggacatgactgatgtgcttcagtctttgtataataaatgcatcttcgcc

SEQ ID NO: 7435 - DNA, 2958 bp, Homo Sapiens
  XM_934743
gggggggctgcgggtggcatgtggagcctcccaccaccacctaggtcctgagatgcgctgaagcccagcctgtctgccatcatcccccagcatggaccgtgggagcctcctgcccttccagctatggtgcccccggccctttggcacctactcacagaaccagccacgcccgccttctgcggccctcaagccatcagcctgccctgagcctggtggcggggccgagccagaccatgggcctgcccactcagagaacacaccacccgccttggccactgaggtccctgcctcccagccggctccgctcctctcagcagcagctgctggtgatgagggtcgagtcctcctggacacgtggtatgtcatcaagcccgggaatacaaaggagaaggtggccttctttgtggcccaccagtgtggtgggggcagccgggccagctccatgaaggtcaaggggcactggggcagcgatagctccaaggccaagcggcggaggcgctgtcttgaccccaccaaggctcctcctgacccagggggccgggagggcccccctgctgctgaggagggccccgcctcagccggtgaggacgtggacctgctctctgtggccgagatggtggccctggtggaacagcgggcagccctggccctgcagagctacccacgaccgaccaccccagcgcctgtagtctttgtgtccgccgagcaaggtggaccggccaagggggtgggatctgaacggcggtccggtggtggggactgcagccgtgtagccgaggccgtggcccactttgaagcgcagagggacagccctcccaccaagggcctccgcaaggaagagcggcccgggccaggccctggggaggtgcgcatcgccttccgcatctccaacggccgggagccccgtgcaccagacagcggcctgcccagtgggggcgggggcaggcctggttgtgcctaccctggcagcccaggtcctggggcccgagccaaggacaagatcacatgtgacttataccagctcatcagcccctcgcgggatgccctccccagcaacgtggagttcctgctggccagggcggatgaggccagtgagggtgacagcccggcacccgccaggcctgaggacactcccccggcgccccctccgccccctgcccgggactgcggagcgtcaggcttccacgtggacgtggtggtgacgggcgtggtagatgagtgcatcttctttggcaaggacggcaccaagaacgtgaaggaggagactgtgtgcctgacggtcagcccggaggaaccgccgcctccgggccagctcttctttctccagaaccgcgggccggacgggcccccggagccacccccggccgactccccggccactgcgcccggcccagacgatgccgagggcacggcggacacctccctgtgccgcttgtaccggcacgtgtcgcacgacttcctagagatccgcttcaagattcagcggctgctggagccgcgacagtacatgctgctgctgcccgagcacgtgctggtcaagatcttcagcttcctgcccacgcgcgcgctggccgccctcaagtgcacctgccaccacttcaagggcatcatcgaggcgtttggcgtgcgggccacagactcgcgctggagccgagacccgctctaccgcgatgatccgtgcaaacagtgccgcaagagatacgagaagggcgacgtgtcgctctgccgctggcaccccaagccctaccaccatgacctgccttacggacgttcctactggatgtgctgccgtcgagccgaccgcgagactcccggctgccgcctgggcctccacgataacaactgggtgctgccctgcaatgggccaggcgggggccgggccggccgggaggaggggaggtgaagccgggggaggggaggggagagcccaccacgcccacccctcccctctccccccgggagccgagggtccggactgggccgcctgcccattcccctactccaggcagcattgatccctcaccggaactgagctggggttcagcaggggtgacccaggaaagccctctgcttgatcctgttgattttctactcttcagaaccagggccgtggaccctctgagaagggtgttttttttttttttatcagcatctcactttcttctccattcagccccaaccccctccctgccatgctttccaccccaaggacccaccagcagggagcagacggcagctaattttggtaccacttaagggtccccccattctggcccccatcctctccctcaccccaattctttctcgctggagctgttatttcccaagaagccgcatcgcccaaggttggcacctctcctaacctgccacacgacagctctcacctctctaggaattgggggctgtcaggtcacaggtgggatctggcatttttttatgacagtccatttctagatggtttgcctattaaagaagtgggggggaaatactgttttctccttaacctcaagctaccagtctctcctcttccgcgtagaggaagaggggggcagacaaaaaaaaagctgaagtataaaaaccctcctcctcccgttattatttaagctactgccatcaaccccacccccataaagctgtgaagccctttgcctcgcttttgacagcgtgggggggccccgtgggcagggacttcggatttgcatttctgggttgtttttccttccactctggggtctcgttcaggcattggggtctcctcaccccagccacatgtttctttaagaatcctttggtcaaccaggaccttgatttttcaggcattttggtctggggtatttttgtttgttctctctgttttttgttttcttttttttctttccatcgtggttctggaagcttctagcgtgtggcatctgaccaattttgaattggtcctttctataaaatcaatatttataa

SEQ ID NO: 7436 - DNA, 477 bp, Homo Sapiens
  XM_934931
tctagtccacgcccgcagccatgccgaccaagggcccgctgcagtcggtgcaggtcttcggacgcaagaagacagccacagctgtggcgcactgcaaacgcggcaatggtctcatcaagctgctggagccagttctgcttctcggcaaggagcggtttgctggtgtggacatctgtgtccgtatgaagggtggtggtcacgtggcccagatttatgctatccatcagtccatctccaaagccctggtggcctactaccagaaatatgtggatgaggcttccaagaaggagatcaaagacatcctcatccagtatgaccagaccctgctggtagctgatcctcgttgccgggagtccaaaaagtttggaggccctggtgcccatgctcgctaccagaaatcctaccgataagcccatcatgactatcaaaattcacctgtataataaacagtttttgagggattttaaagttaaaaaa

SEQ ID NO: 7437 - DNA, 1651 bp, Homo Sapiens
  XM_935575
atgaaacaacattgtggagaggaaagcattaggggagcccacggctacaaaaacaaggaaattctcaagaatacgctctacaaatctacgtgcgcatcattttcacctcgcgtcgcgcccgggaggaaggaacgaggcaaggagctaaagcagcgtgcgttcagccctgggggcgtgaagaaggcgtcccctccgctgccggcggagctgatcggctggctagtcaatttccccttagcacgccccgtgcgcccaccctcgctcagcccggggccccctcgccgtcccccggaaggggtctgcggttcctggccaggacgttcggaaggcgagcgggggaaggtagggctgtcgcgggaacccggcttaaaggacgcggtgtctcggttctccactggaatcagcaactccctggaactcgggcctctggccccgtccctcttttctccggcagggacgcaggatgccttggtgcactctagagacggggaccggagggtgcagcgcgcctgggtggggcgaagggcgccggtctcctcacgccctctgactttaggataccagacagtgtctcttcaaccccaccccaggcgcaggtttccagaaggcggggtgggtggggcccccgatttccagaaggcgagttacctagcaggtgtgtggggtgggcattgctattcggagaaaaatcaagacgttcccttcagtcctccctcggtgttaacgtctgctccagctcgcagcccgctgctgggaggaaaatggaagaaacggagatacttttagtgaagcagaataaaccactgaacaggaaaaatgaggaagctgtgagtaccagtggaaggaacgagccaggaagagggactggaaccatctcagaagccatgcccctcaggctggaacttgccctgtctcctcgcagatgagctacctcttgtgtttaagaattaaaggaagatgagctaggaatcaagaaatacgcagaactgattcctgtcactggcgccaccctgccacttgcccagagctgtggtataaatttttttaataggctgaaataaaaatatgaatagcattttggtattaagcattaaattgataaaggctatgagatacacctgctctcaaccatgttaattttttattattggtattaataaattattacttactaacatattaacaagaattgcattgagaaacaaagcatccacaggccaaatcttctgaatttcaaatgtttatattaatgcgttgtattctagaaaagtagaattgtcttaagtagctttgtaatataaagtcatctatcagcccattacacctattagaatgttttaacctttatttcccacttttttgtttctagactgagtgtacttggtctggtatttgtggcataacttacggaacacataagaatgatacagatactatttaatgatgacctaatacaagcttagatagctaaggtgaaagcttctatggccttaacattttcctcttgaagaatgtattttctgtaataaaatacagtggctacttgaaatctataaacttatgtgaggtctggataaatctgagcaactttcttctttgtgctccaggaacctacgcactatatatataaataaagcttaagtaaacatca

SEQ ID NO: 7438 - DNA, 915 bp, Homo Sapiens
  XM_935666
atggggaaagctgacgtcggaaggtttaagatcaatctcctctacgcctttgccatggtacccagtgccaaccactccacattaatcagccatgtgctgttccaggggtcactgtcattcggggacgtggctgtgggcttcacccggaaagagtggcagcagctggacctggagcagaggaccctgtaccaggatgtgatgctggagatctacagccacctgctctctgtggggtgtcaagtcagcaaaccagctgtgatctccagtttggagcaggggaaggagccatggatggaggaggaagagataaggacgtggagcttcccaggagcgaatccacgcggaggtcaccagtgtggcagtgctttaagctgtgacgagggagttcctgcagctcagggagccagtagtgagaaaccccacgaatgcacgaagtgtgggaaagccttgtgctgcagatcggacctcagggtacatcacggggtccacgcgggggagaagtcctctgcgtgcagtgaacgggggagtggtttcagggagaagctttgccctgacaaacagggaactcacacaaaggagaaacccgctagagacagaagtggtaaaacgatcttccggaagacacgcctgtgtgtcccgggcacagttcacgccggagcgaagccttacaagtgttgggagtgtgagaaaacctcccacaagtcgcgcctcatcgagcaccttcgctcccacccgggggagaagccctgcggctgcagggaatgcggaaaggcctttttccagaagtcacacctcatcctgcgcggactcgcggggaagaaaccgtacgagtgctccgactgcgggaagacctcccggaaggcgaacctcatccgccaccacgggatccacacgagggagaagctgcatgggtga

SEQ ID NO: 7439 - DNA, 510 bp, Homo Sapiens
  XM_935770
atgcagacaattaagtgtggtgttgtgggcgatggtgctattggtaaaacaagtctcctgatatcctacacaacaaacaaatttccatcagaacatatgctgactgtttttgacaactatgcagtcacagttatgattgctggagaaccatatactcttgggctttttgatactgcagggcaagaggattatgacagattactactactgagttatccacagacagatgtatgtctagtctgtttttcagtggtctctccatcttcatttgaaaatgtgaaagaaaagtgggtgcctgagataatttgccactgtccaaagactcctctcttgcttgctgggacccaaactgatctcagagatgactcctctattgagaaacttgccaagaacaaacagaagcctatcactccagagcctgctgaaaagctggtccgtgacctgaaggctgtcaggtatgtggagtgttctgcactcacgcagaaaggcctaaggaacgtatttgactaa

SEQ ID NO: 7440 - DNA, 435 bp, Homo Sapiens
  XM_936043
atggtctccggtcggtgggctcctccacgcccagcttgggcctcccggcgacctctgcaggcccaagtcgtcctgaagtcggcgtcgcccggccctgcctcccagcaagggcctctccaggcccagctctcgcccccacggcggcctcccggcagcccgcgtgcggcccagttcctccctcacggtggcctgttgatgcccaactcatgccgctggcaccctgcgcagaggcgccccgaactttctcgagccaagctcttcgcgcccgcctactgcctctcggtggcctgtacaggcccagctctggcggaagaacagcctctgcaggtcccgctcttgcctcccaggggcctctccaggcccagctctcgcccccacggcggcctcccggcagcccgcgtgcggaccagttcctccctcacgggggcctgttga

SEQ ID NO: 7441 - DNA, 1919 bp, Homo Sapiens
  XM_936050
atgtcaagggaagccattcatgtgggggtactgtgcgctgctgaccattgggtgctgctgaagttaggcaccgcccaagaagtgtgcagccagaacgaggtgctgcagaggcagagtgtatgtgctacaggagctggtattgcagatggcacaggtgttgcaggtgtctgcctagaggagcacaatggaaccaggaaaagcagcccttgccccttcagtgtgtcagcagcaccctcgattgacaaagtttcactctgtgcttactgtcatgggagaggattttacctcctccattccaccaaaacagctcttatgagggtcaccaatgagctccacattgctaaattggttaaaaatgtgtctgcaggcacacaggacgtgccttcacccccatctgactatgtggaaagagttgacagtcccatggcatactcttccaatggcaaagtgaatgacaagcggttttatccagagtcttcctataaatccacgccggttcctgaagtggttcaggagcttccattaacttcgcctgtggatgacttcaggcagcctcgttacagcagcggtggtaactttgagacaccttcaaaaagagcacctgcaaagggaagagcaggaaggtcaaagagaacagagcaagatcactatgagacagactacacaactggcggcgagtcctgtgatgagctggaggaggactggatcagggaatatccacctatcacttcagatcaacaaagacaactgtacaagaggaattttgacactggcctacaggaatacaagagcttacaatcagaacttgatgagatcaataaagaactctcccgtttggataaagaattggatgactatagagaagaaagtgaagagtacatggctgctgctgatgaatacaatagactgaagcaagtgaagggatctgcagattacaaaagtaagaagaatcattgcaagcagttaaagagcaaattgtcacacatcaagaagatggttggagactatgatagacagaaaacatagaaggctgatgccaagttgtttgagaaattaagtatctgacatctctgcaatcttctcagaaggcaaatgactttggaccataaccccggaagccaaacctctgtgagcatcacaaagttttggttgctttaacatcatcagtattgaagcattttataaatcgcttttgataatcaactgggctgaacactccaattaaggattttatgctttaaacattggttcttgtattaagaatgaaatactgtttgaggtttttaagccttaaaggaaggttctggtgtgaactaaactttcacaccccagacgatgtcttcatacctacatgtatttgtttgcataggtgatctcatttaatcctctcaaccacctttcagataactgttatttataatcacttttttccacataaggaaactgggttcctgcaatgaagtctctgaagtgaaactgcttgtttcctagcacacacttttggttaagtctgttttatgacttcattaataataaattccctggcctttcatattttagctactatatatgtgatgatctaccagcctccctattttttttctgttatataaatggttaaaagaggtttttcttaaataataaagatcatgtaaaagtaacaaatgtgtgaaatttaaagattgtaaatatatatttacttttttaagatcaaagtttaaaccccgtggttagaattttgtgtgtttttaaatactttttatctttttgcatgccttttttaaaaaaccaactagaacttttcattatatcagaatatctgattacatttataattcaattgtgacttgaactgtatcttacaggaatgttcaatttctatacatattttataaggtattaaacctggtgttttcttt

SEQ ID NO: 7442 - DNA, 3340 bp, Homo Sapiens
  XM_936052
atgtccctccctaagccctggtctctcttgcctcctgcagggctggtgaattaccagatctccgtcaagtgcagtaaccagttcaagtaggaagtgtgtcttttgaatgcagaaaacaaagtcgtggacaaccaggctgggacccagggccagctgaaggtgctgggtgccaacctctggtggccgtacctgatgcacgaacaccccgcctacctgtactcgtgggaggtgcggctgactgcacagaagtcactggggcctttgacttctacacactccctgtggggctccgcactgtgcccgtcaccgagagccagatggtgattgctcacaccaaagccttggacccctcccagcctgtgacctttgggaccaactccacctacgcagcagacaagggggctctgtatgtggatgtgatccgtgtgaacagctactactcttggtatcgcaactacgggcacctggagttgattcggctgcagctggccgcccagtttgagaattggtgtaagacatcacaatcccattattcagagcgcgtatggagtggaaacgcttgtagggcttcaccaggatccacctctgatgttcagtgaagaggaccagaaaagtctgctagagcagtaccatctgggtctggatcaaaaacgcagaaaatacgtggttggagagctcatctggaattttgccgatttcatgactaaccagtgtgtcagtttcttggtagggaatgaaaatagtgccaacctgtgataccttcaccctaattttactttctgaggaagttttctgtaatagttatttggtgataattattaatactggtgagaaaatcaatgtaaaagaggagaaataacccacacaaccacatacaactaggaaatgatagatggatctgaaaaaaaggataagcactcttaacaagttcaacacccaagtactattgcaagtacaagctgtatttcatggaaaaaaaaaaaagaataactcaaaaggcagaacgaagagcctagaggtcagagatgagaggcatgaataattattcacaggcgttgaatataatcaaatgacttgcaacatttaccactgggattttaaaatgtggtggaccaatcattcttttagtctgtgcattttcccatttttttcaacaggaatgtctagagacattattcctgttttgccactgtatttttggtgaatgtgtagtaagtaactggcctctttagtatcacaaagctggatgaagaaaatgtggtacatatacaccatgaaatactatgccgccacaaaaaggaaatgagatcatgtcctctgcaaggacatggatgaatctggaagccattatccttagcaaagtaacgcaggaacagaaaaccaaacaccacatgttgtctcttagaagtgggagctgaacagtaagaacacatggacacagggtggagaacaatacacactggggcttgatggggggtggaggggagggatggggagcattagaaaaaataactaatgcatgctgggcttaatacctatgtgatgggttgataggtgcagcaaaccaccctggcacatgtttatcaatgtaacaaacctgcacatcctgcacaggtactccaaaactaaaagtaaaaaaatctaaaagaaaaaaaaaaaagaattaaacccaaaatcacttccccatctggacttgatttagatgaaaagcttctggactttgagctgatgctatagtgggttgaaaattttggggtcctcagaaggggatgaggatatattgcatgagagagcaacatgaatcattgagagccagaatatagagagtggtaggtagactgtaggagagccctcaatgatcccagctttcttgtattcgcgttgcacttacttgtataatatggcagatgggatgtgatgtcactttcaagattaggttataaatagactatggcttcaatcagagggttttctctctgtctagctctcttttgggtagttcattctgaggaaagccagctgccacgttatgatgtaggcctgtgaggtccacgtagcaaagaacatatggaagatttctaccaccccctaactaagcctttaggtcagaccgcaaccccagccaacaaggtagctacaaactcttgagaagccttgagacagaggtactcaatagagccattcctatgagaaacgtaagtatctgctgttttacaccgctaaggttttagctaatgtattatgccataatagataagttatatacaacctttatcaaataataaaagtaaccatcatcagtaatgagacaaatcaaaaaccatggcccacccaatagaacataatgaggagagtacagaattgcttctgggatatttctgacaaagatgtatatgcttcattcatacatgaggaaacatcacacatactcaagatgggagagccattctaaaaaataactaggcagaaatcttcaaaaatattaaagtcacggaaaccaagaaaaaatatgaacctgttccagattaaaggaaactaaacagacctaacattttaatacaatgtttgattttgaacttgaactttttgttatataagacactattgagacaagtgctaatgcttgaatagggctgaaggattagattataataatacattaatgcaaatttcctgattttaaacattgtagtttgattgcacaaggagaatgtctttatgtgtggaaaataaatagtcaacattctgtcttcaagcttctgaaaaaactctgcttttagggcatagatagaagtggatgataattcacctgttcctctgctactaattgagctgctctctgtttccatggctggctcatgggatgagagaatatatctagttttttatgtttcaatttgtctctctatggcatttttgtgaaaataaggaagtgtggagacttatatatgtttctaaattgtaatagttcattaatgtaaagtacagacacagtcttcacttttccttcttagaccgtttaaatatggccacgaaacaagtagtctctggttggctgggcactgtggctcatgtccttaacaccaacactttgggaggccgaggcaggcaaatcacttgaggtcaggagttcgagaccagcctggccaatgtggcaaaaccccatctcttctaaaaatacaaaaattagctgagtgcggtggtgcacaccggtaatcccagttactcgagaagctgaggcaggagaatcacttgaacctggaaggcagaggttgcagtgagccaagaccgcaccactacactccagcctgggcaatagagcaagactccatctcaaaaa

SEQ ID NO: 7443 - DNA, 4561 bp, Homo Sapiens
  XM_936085
ctgaggtaggcggatcacctgaggtcggcagtttgagaccagcctgaccaacatggagagaccccatctctactaaaaatacaaaattagccaggtgtggtggctcatgcctgtaatcccagctacttgggaggccaaggcaggagaattgcttgaacccaggaggcagaggttgcagtgagccgagatcacaccattgcactctagcctggtgaaggagcaagactccatctcaaaaaaaaaaaaaaaaaaaaaaagaaagaaagaaaaatacacattcagaggagacaaaaaataaaaaacaatgatgcatgcccacaggatctagaaaataacttcttaagggcaaatctaggagttattggccttaaagaagagatagagaaagagataggaatagaaagtttgttgaaagggataataacatagaacttcctaaacctacagaaagatatttatatccaagtacaagaaggttatagaacaccaggccaatttaacccaaagattacctcaaggcatttaataatcaaactcccacaggacaagggtaaagaaaggatcctaaaagcagcaagagaaaagaaacagataacatacaatggagctccaatacatctggcagtatatttttcagtggaaaccttacaagccaggagagagtgacatgacatatgttaaagtgctgaagggaaaaaaccttttaccctagaatagtatatccagcaaaaatatccttcaaacatgaagaataaacaaagacttccccagacaaacaaaagctgagggatttcatcaacactagactggtcccataagaaacgcttaagggagtactttggtcagaaagaaacagacattaatgagcaacaaagaatcatctaaaggtaaaaaactcactgttaagagtaagtacacagaaaaacccaaagtgtgataacattgtaactgtggtgtgtaagtagaaagaataaatgataaaccaatcaaaaatagtaactacaacttttcaagaccagtcagaaaaataagataaaattagaaacaacaaaaagttaaaaagtggggggatgaagttaagatgtagagtttttattagttttttgtttgttaatgcaaacagtgttaccaggttaaaataatgggttacaaaatagtatttgtaatccttatggtaacctcaaacctaaaaacatacactggatacataaaaaataaaaagcaaaaacctaaatcatatcaccagagcaaactaccttccctaaaggaagacaggaagaaaagaaagaagaagaccacaaaacaaccagaaaacaaataaataacaaggcaggagtaagtctttacttatcgataatacattgaatggaaatatggactaaactctccaatcaaaagacatagactggctgaatgaatggagaaaacaagacccattgatctgttgcctacaagaaacacacttaaactataaagacacacataggctgaaagtaaagagttggaaagagttattccatgccaatggaaaccaggaaaaagagaaggagtattgattttgatacaaaaactatgagacaaataaagtcactatacaatgataaaggggttaatatggtttccatttgtgccccacccaaatttcgtgttctattgtaatcctcaatgttggaggtggggcctggtgggacgtgattagatcatgggggtggatctttcatgactaattcagcaccatcttcttagtgctgttctcatgatagtgagttcttctgaaatctggttgcttaaaagtgtgtagcacctctccacaccacccgcttgccttggtctactcctgctatgtagatgcttgctcccactttgcattattccatgagtaaaagctccctcaggccttcccagaatcagatgccgctatgcttcctgaacagcctgtggaactatgagccaattcaacctcttttcttcataaattaacaagtcttgggtatttctttatagcagtgtgagaacagaataatacagaaaattggtaaagaggagtgaggcattgctagaaagatacctgaaaatgtggaaacagcagtggaactgggaaatagacagaggttggaagagtgtggagggctccgaagataggaagatgaggggaagtttggaatttcttagagatttgttaaattgttttgaccaaaatactgatagtgatatggacaatgaagtccaggctgaggaggtctcagatggagatgagggacttattgggacctggagtgaaggtcacttttgttaggacattgtggttggagacattgtgcccctgccctaggaatctgtggaactttgaacttgagagcgaagatttagggtatctggcagaagaaatttctaagcagcaaagcgttcaagacgtggcctggctgcttctggtagtctgtgctcatatttgtgagcaaagacatgacaagaaactggaacttatatttaaaaaggaagcagagtgtaaaagtttggagaatttgcagcctggccatgttgtagaaaagaaaaaaaccattttctggagaggaattcaagctagctgcagaaaattgcaagtaacaaggagcaaaatgttgatagccaagatagtgggaaaaacaccttgaaggcatttcagataccttgggggcagcctctcccatcacaggcccaaaggcctaggagggaaggatggtttcctgggccaggctcagggtcctgctgccctgcacaacctcaggaaactgctctccaaatcccagctgctccagctccagcttcagctcaaagggccccaggtatagctcaggctgctgctccataggatgcaagttataagccttagtggctcccgtgtggtgttaaattaagcctgtaggtgcacagagtgcaagaattgaggcttgggagcctccaactagatttcagagtatgtgtgggaaagcctggatgtccaggcagaagccagctgcagggacagagccctcatggagaacctctactagggtagtgtggaggggaaatttggggttggagttcccacacagcttcccctctggtgtactgcctagtggagctgtgagaagacagccactgtcctccagattccaggatgatagatctgccaatgacagcttgcactgtacaactggaaaagccacaggcagtcaatgccagcccgtgaaagcagtgacagtggcttaccctgcaaagtcccaggggctgagctgcccaaggccttgggagcccaccccttgcaccagtgtgccctggatgtgagatatggagtcaaaagagagtattttggagctttaagatttaatgactacctgctgggtttcagacttgcatgggtccagtagcccctttcttttggccaatttctcacttttggaatgggagtgtttacccaattcctgtacccccactgtatgttggaagtaactaactgtttttttattttgtaagctcacaggtgggagagacttgccttgtctcaggttgagactctggactttggacttttgaattaatgctggaatgagttaagactttgagggactgttgggaagatataactgtattttgcagtatgagaaggacatgagatttgggagacaccagaggtggaataatatgatttggatctgcatccccaccaaaatctcatgttcaattgtaatcctaaattttggaggttgagcctggtggaagaggattggataatgggggtggtttctcatggtttaacaccatccccctgggtgctgttctcatgacagtgagtgagttattgtgagatctgattgtttaaaagtgtgtgccacctcctcccactttcctcctgctccagccatgtaagacaggcttgcctccccttcaccttttgtcatgattgtaagtgttctgaggcctccccagccatgcttcctgtacagcctgcagaactgtgagccaattaaacctcttttctctatatattacccagtctcgggtatttctttatagcagtgcaagaatagactaatacagggttcaattcagcaagaggatataacaaatataaatatatatgcactcaacactgcagcacccagatatataaagcaaatacgattagagctaaagagagagagtgaccccaatacaataatagctggagacttcaacaccacattttcagcactggacagatcttccagacagaaaataaaaaagaaacatcagacttaatctgcactgtagatcaaatggatctaatacatacttgcagaacattttatccaatggctgcagaatacacattcttttttagcacatgtatcattctcaaggatagaccatatgttaggtcacaagtcttaaaacattaaaaaagttgaataccatcaagcatcttctctgaccacagtggaatacaactagaaactaataacaagaggaatttttgaaactacaaatacatgaaaattaaacaatatgctcctgaatgaccattgagtcaatgaagaaattaagaaggaaattgaacaatttc

SEQ ID NO: 7444 - DNA, 3130 bp, Homo Sapiens
  XM_936101
gcccccgcgccccgcaccgcgcgtcccccgcgccgccgccgccgcgagtccagctcgcaggaggaggaggtcatcgacggcttcgccatcgccagcttcagcaccctggaggccctggagaaggatatggccctgaagccacatgagcggaaggagaagtgggagcgtcgtctcatcaagaagccccgggagtcggaaacctgcccccctgcggagcccagtgagaacaggcggcccctggaggcaggcagccccgggcaggacctcgaacccgcctgcgatggggcgagaaaggtcccactgcagccctccaagcaggtgtgctccccagaaggggggccgctcccagccagccactgggaccagaacggcccggcccagcgccagcaacagctccagcccagccagtccagccagccccaggggtccctcccagccccgtcggcactcccggaccctgggcagccctgccagccctcccagcggccactcctgggtcagcgcagctggccccagcggtcacttctgggcctgaaacagccctgccagccccggcggtcacttctgggccccggtcagccctgccggccccagcggctccttccatccccagatcagctctgccagccccagcggtcacgcccggcccagccctgccggccgcattgggcactcccaggccccaggcagtgctgcaggcgcctgcggtccctgctgaccccgtgtcaccactgccggcgcctgcggtccctcctggccccacggtccctcctggtcccctgcctctactgccggcgcctgcggttcctcctggccccaaggcaccgctgcaggcgcctgcggtccctgctgaccctgtggcaccgctgccgacccctgcggccgtgggccagcccgtgtcactgtggccagcccggtagggcatcctcaggacagcgcagccggcccctgtggtcgctgctagcccagtgccagcggtaccagcccccgcggccactcctcaccctccgaccacgccgacggcccgccagcttcctcccaggacagtgctgctgcccccggcgggccttcctagccccgtgtcagtacggccagccccgaaggtccctgctgggccagcccagccgcccccggcggtcgctgctgcgccccaggcagccccagcggttagtggaagccccagagcagcccggcccactcacgccttcactcctgggcccgggacggccgaggcagcagaagcagccgctcatgggcccggagcagccctgcccacccaagcggccgctcatgggcccagagcagccctgccagcccctgcggccgctcatgggccccaacaagccctgcaaaccccagccgttgctccccattcccgatcgcccttcactcctggggcagccgggcccaccctgccggcctctcctggggctcctgtgccagccgcggcggtccctattggatctggtgccggcccgtcagccccggctctcgctcctggccctgggccatccctgccggcccctgcggtcccggtggacccgatcctgtgcccccgggatggcccgtcaggccccatctgtgagccctggagcctgatgcctgcaggcacctccccatatgggttttccagcccactccagtgtgatctgcaccctggcagggccccaagggccaaggccgcattgcccttcgggctggagatgctttgccggactagcctgaggccttgtctagacagggctgagctgtttgtcgttggaaattgaggctcggccagaggcgggagcccctacagtgccacgatcaggctgaggctcaccacaccaggaagagagatgaacccgcgtctgcctgccgccccgccatgctccctctccccccactggcgtcacagtgcccccacccgcgttgctgcctgtggtgtgcgtgccctgggaggggaacacagcccctgagggcggggaccttgctgggggcccctcagcgtctttctgtgcctctgaattgccaatactgtccttgcatctctgagtctacgtgcacgcttgcccctggcgtgccacctgtgcggagcgcgtgagcctggtgtgtgcgtgctgtgtgtgcatgtgtgcgagagggtgtgagagtgagtggcgtgctgggcatgaaggatctgtggggtgctgcagttcctgcagagtggcccagtggcgaatggtgaaggtgtgggtttcagtccaggccctccccctggtagtcaggaggtgctggtgtccacctccagggcccccaagctacagggggcacatgggcccatctggtgggtcaggacctgcaggggacccggaggctcccacccccacctctcaggactctgcctccaccacccccgtgggcatgcactgaagggttgcctgcagggtctccaggcgagggggaccccacagggtgggcagcgccttctcccggcttccccacagtcccctgcagcgtcccgtctggctgttgacctacatgtggtcgggcacacctcacactacaaggctacccctgggcccatccctgccccttccacggcccccacctgtggtcaggtgttgccaccccctcaggacctggtctcaaggcagccccactcgagtcttctggagtccaaggcacgccactcgcccaaaagggagggggtgtttgggggggctttgactgtctccagacctcaggggagctgggcaggctctaaccagtggtcctccagagagcagcgttgaccacctggacccctgcgccacgtgacaggaggctctggtcctgcaggcctggtcttgcccagctgggctgcctcaggtgtcaggaaggggatgggtgtccctggctcccaggccaggcagctgctgacctccagcaccccgcacttgctcatgaggaccccacccccgcaggccctcccgggtcctgaccagcctctggtgcagcatctgctttggcctccgggccccctcgctccccacccacccgggccccttcctccggtgctcacctggggcctccatcccagaagcgcagggcttatttttctgattaaagaaaataaaaagtgccgtgccactaaaaaaaaaaaaaaaaaaaaaaaaaaaaaaaaaaaaaa

SEQ ID NO: 7445 - DNA, 165 bp, Homo Sapiens
  XM_936103
atgccgaaggcgcccaagcagcagctgccggagcccgagtggatcggggacggagagaacacgagcccatcaggtgaggctggtaggcaaggaagacacgagaggaaggggaagagagaggagactgcgcgtgttttaggagagggtcatggggcgcgagactga

SEQ ID NO: 7446 - DNA, 486 bp, Homo Sapiens
  XM_936105
atgtcttcacatctacctttctatgtcacatgtgcaagatggttgctctgccttcagacatcacatttacattccaggcagaaaggagaaggaaagagcaaaagatgtgttccgaacaaatccatcttaaaaacaaacaaggggaggggtagcaggagaaaatttaaaaagaagaagaagaaaaacaaaaacaggaaagccgttgtttccctaaaagccccatcaagccgacttctaccggtgactcattacccagtcatgtggccacgcctggattcaaggcagtctgaggaggtgagtgtttcaaagaggcacatggatgccacagacaaaatcaagtttccatggttgaaggagaagaggacgatagagtttggggaggcagcaggctacgtctgccacagaagatataaagatatggagccacacgagaagatgggggaggctgccaaaaaagtccactgggtacagatgaggagcaggtga

SEQ ID NO: 7447 - DNA, 1640 bp, Homo Sapiens
  XM_936128
ctcacaattgctctacaactcagaacagcaactgctaaggctgccttgggaagaggatgatcctaaacaaagctctgatgctgggggcccttgccctgaccaccgtgatgagcccctgtggaggtgaagacattgtggctgaccacgtcgcctcttatggtgtaaacttgtaccagtcttacggtccctctggccagtacacccatgaatttgatggagatgagcagttctacgtggacctggggaggaaggagactgtctggtgtttgcctgttctcagacaatttagatttgacccgcaatttgcactgacaaacatcgctgtcctaaaacataacttgaacagtctgattaaacgctccaactctaccgctgctaccaatgaggttcctgaggtcacagtgttttccaagtctcccgtgacactgggtcagcccaacatcctcatctgtcttgtggacaacatctttcctcctgtggtcaacatcacatggctgagcaatgggcactcagtcacagaaggtgtttctgagaccagcttcctctccaagagtgatcattccttcttcaagatcagttacctcaccctcctcccttctgctgaggagagttatgactgcaaggtggagcactggggcctggacaagcctcttctgaaacactgggagcctgagattccagcccctatgtcagagctcacagagactgtggtctgcgccctgggattgtctgtgggcctcgtgggcattgtggtgggcactgtcttcatcatccgaggcctgcgttcagttggtgcttccagacaccaagggcccttgtgaatcccatcctggaatggaaggtaagattgagatttgttagagctgaatccgcagtatgagaggaaggaaagtggaggaggctgtggacatgaatggttgaaagttgtaggggaattgggaagtggcatgatgatgacataggagcggcctaggacccatccatctcatgtctgtcctgttgcaggtgcatcgccatctacaggagcagaagagtggacttgctacatgacctagcattattttctggccccatttatcatatcccttttctcctccaaatgtttctcctctcacctcttctgtgggacttaaattgctatatctgctcagagctcacaaatgcctttgaattatttccctgacttcctgatttttttcttcttaagtgttacctactaagagttgcctggagtaagccacccagctacctaattcctcagtaacctccatctataatctccatggaagcaacaaattccctttatgagatatatgtcaaatttttccatctttcatccagggctgactgaaaccgtggctaagaattgggagactctcttgtttcaagccaatttaacatcatttaccagatcatttgtcatgtccagtaacacagaagcaaccaactacagtatagcctgataacatgatttcttagctgacattaatatttctttcttccttgtgttcccacccttggcattgccacccacccctcaattaaggcaacaatgaagttaatggataccctctgcctttggctcagaaatgttatagcaaaaattttaaaataaaaaagtaagtctgtactaatttcaa

SEQ ID NO: 7448 - DNA, 852 bp, Homo Sapiens
  XM_936215
tcgcgccaaacttgaccgcgcgttctgctgtaacgagcgggctcggaggtcctcccgctgctgtcatggttggttcgctaaactgcatcgtcgctgtgtcccagaacatgggcatcggcaagaacggggacctgccctggccaccgctcaggaatgaattcagatatttccagagaatgaccacaacctcttcagtagaaggtaaacagaatctggtgattatgggtaagaagacctggttctccattcctgagaagaatcgacctttaaagggtagaattaatttagttctcagcagagaactcaaggaacctccacaaggagctcattttctttccagaagtctagatgatgccttaaaacttactgaacaaccagaattagcaaataaagtagacatggtctggatagttggtggcagttctgtttataaggaagccatgaatcacccaggccatcttaaactatttgtgacaaggatcatgcaagactttgaaagtgacacgttttttccagaaattgatttggagaaatataaacttctgccagaatacccaggtgttctctctgatgtccaggaggagaaaggcattaagtacaaatttgaagtatatgagaagaatgattaatatgaaggtgttttctagtttaagttgttccccctccctctgaaaaaaataccatttatgagacattcttgctataactaagtgcttctccaagaccccaactgagtccccagcacctgctatagtgagctgccattccacacccatcacatgtggcactcttgccagtccttgacattgtcgggcttttcacatgttggtaatatttattaaagatgaagat

SEQ ID NO: 7449 - DNA, 198 bp, Homo Sapiens
  XM_936220
atgatcagaacgttttttctctctctagatgttgttattcatgaggaccaatggattggcgagacagtactacaatcaacatttagcagtcagttattaaatcttgggagttattcatctattcagcctgaagaatcattccgtggacctctgaagttcttctgtggaacttctgagcctctgattaagaatccttga

SEQ ID NO: 7450 - DNA, 4479 bp, Homo Sapiens
  XM_936233
atggtaccttactggtctttggggttccagctgtgtcgctatggctaccagaatgactctgagatcgccagcttgtatgatgagatggtggctgcccagatcccttatgatgtgcagtactcagacatcgactacatggagcggcagctggacttcaccctcagccccaagtttgccgggtttccagctctgatcaatcgcatgaaggctgatgggatgcgggtcatcctcattctggatccagccatttctggcaatgagacacagccttatcctgccttcactcggggcgtggaggatgacgtcttcatcaaatacccaaatgatggagacattgtctggggaaagctatatcgagcttatgtggccttcccagactttttccgtaattcaactgccaagtggtggaagagggaaatagaagaactatacaacaatccacagaatccagagaggagcttgaagtttgatggcatgtggattgatatgaatgaaccatcaagcttcgtgaatggggcagtttctccaggctgcagggacgcctctctgaaccaccctccctacatgccacatttggagtccagggacaggggcctgagcagcaagaccctttgtatggagagtcagcagatcctcccagacggctccctggtgcagcactacaacgtgcacaacctgtatgggtggtcccagaccagacccacatacgaagccgtgcaggaggtgacgggacagcgaggggtcgtcatcacccgctccacatttccctcttctggccgctgggcaggacattggctgggagacaacacggccgcatgggatcagctgaagaagtctatcattggctccttttatttcctcttgtttcagacgggagcagatatctgtgggttctttcaagacgctgagtacgagatgtgtgttcgctggatgcagctgggggccttttaccccttctcaagaaaccacaataccattgggaccaggagacaagaccctgtgtcctgggatgctgcttttgtgaatatttccagaaatgtcctgcagaccagatacaccctgttgccatatctgtataccttgatgcaaaaggcccacacggagggcgtcactgttgtgcggcctctgctccatgagtttgtgtcagaccaggtgacatgggacatagacagtcagttcctgctgggcccagccttcctggtcagccctgtcctggagcgcaatgccagaaatgtcactgcatatttccctagagcccgttggtacgattactacacgggtgtggatattaatgcaagaggagagtggaagaccttgccagcccctcttgaccacattaatcttcatgtccgtgggggctacatcctgccctggcaagagcctgcactgaacacccacttaagtcgaaagaaccctcttggtcttattattgccctagatgaaaacaaagaagcaaaaggagaacttttctgggatgatgggcaaacaaaggatactgtggccaagaaagtatatcttttatgtgagttttctgtcactcaaaaccacttggaggtgactatttcacaatcaacctacaaggaccccaataatttagcattcaatgagattaaaattcttgggatggaggaacctagcaatgttacggtgaaacacaatggtgtcccaagtcagacttctcctacagtcacttatgattctaacctgaaggtcgccattatcacagacatcaatcttttcctgggagaagcatacacagtggagtggagcataaagataagggatgaagaaaaaatagactgttaccctgatgagaatggtgattctgcagaaaactgcactgcccgtggctgtatctgggaggcatccaattcttctggagtccctttttgctattttgtcaacgacctatactctgtcagtgatgttcagtataactcccatggggccacagctgacatctccttaaagtcttctgttcatgccaatgccttcccttccacacccgtgaacccccttcgcctggatgtcacttaccataagaatgaaatgctacagttcaagatttatgatcccaacaacaatcggtatgaagttccagtccctctgaacatacccagcgtgccatccagcacccctgagggtcaactctatgatgtcctcattaagaagaatccatttgggattgaaattcgccggaagagtacaggcactataatttgggactctcagctccttggcttcaccttcaatgacatgtttatccgcatctccacccgccttccctccaagtacctctatggctttggggagactgagcacacgtcctacaggagagacttggagtggcacacttgggggatgttctcccgagaccagcccccagggtacaagaagaattcctatggtgtccacccctactacatggggctagaggaggatggcagtgcccatggagtgctcctgctgaacagcaatgccatggatgtgacgttccagcccctgcctgccttgacataccgtaccacagggggagttctggacttttatgtgttcttggggccaactccagagcttgtcacccagcagtacactgagttgattggccggcctgtgatggtaccttactggtctttggggttccagctgtgtcgctatggctaccagaacgactctgagatctccagcttgtatgatgagatggtggctgcccagatcccttatgacgtgcagtactcagacatcgactacatggagcggcagctggacttcaccctcagccccaagtttgccgggtttccagctctgatcaatcgcatgaaggctgatgggatgcgggtcatcctcattctggatccagccatttctggcaatgagacacagccctatcctgccttcactcggggcgtggaggatgacgtcttcatcaagtacccaaatgatggagacattgtctggggaaaggtctggcctgattttcctgatgttgttgtgaatgggtctctagactgggacagtcaagtggagctatatcgagcttatgtggccttcccagactttttccgtaattcaactgccaagtggtggaagagggaaatagaagaactatacaacaatccacagaatccagagaggagcttgaagtttgatggcatgtggattgatatgaatgaaccatcaagcttcgtgaatggggcagtttctccaggctgcagggatgcctctctgaaccaccctccctacatgccgtatttggagtccagggacaggggcctgagcagcaagaccctgtgcatggagagtcagcagatcctcccagacggctccccggtgcagcactacaatgtgcacaacctgtacgggtggtcccagaccagacccacatacgaagccgtgcaggaggtgacaggacagcgaggggtcgtcatcacccgctccacatttccctcttctggccgctgggcaggacattggctgggagacaacacagccgcgtgggatcagctgaagaagtctatcattggcatgatggagttcagcctcttcggcatatcctatacgggagcagatatctgtgggttctttcaagatgctgaatatgagatgtgtgttcgctggatgcagctgggggccttttaccccttctcaagaaaccacaacaccattgggaccaggagacaagaccctgtgtcctgggatgttgcttttgtgaatatttccagaactgtcctgcagaccagatacaccctgttgccatatctgtataccttgatgcataaggcccacacggagggcgtcactgttgtgcggcctctgctccatgaatttgtgtcagaccaggtgacatgggacatagacagtcagttcctgctgggcccagccttcctggtcagccctgtcctggagcgtaatgccagaaatgtcactgcatatttccctagagcccgctggtatgattactacacgggtgtggatattaatgcaagaggagagtggaagaccttgccagcccctcttgaccacattaatcttcatgtccgtgggggctacatcctgccctggcaagagcctgcactgaacacccacttaagccgccagaaattcatgggcttcaaaattgccttggatgatgaaggaactgctgggggctggctcttctgggatgatgggcaaagcattgatacctatgggaaaggactctattacttggccagcttttctgccagccagaatacgatgcaaagccatataattttcaacaattacatcactggtacaaatcctttgaaactgggctacattgaaatctggggagtgggcagtgtccccgttaccagtgtcagcatctctgtgagtggcatggtcataacaccctccttcaacaatgaccccacgacacaggtattaagcatcgatgtgactgacagaaacatcagcctacataattttacttcattgacgtggataagcactctgtga

SEQ ID NO: 7451 - DNA, 1155 bp, Homo Sapiens
  XM_936239
tagctgggccagcctggggcttggttctatgtccctgcgggtcggtgcgagggcgaagaggaacccgtgggcccgggggatcccggggggccggaccagtgttccccagttgtgggagcagacgcgtgggcgcatcgcgggcgggcagggcctgaagtgcagctatgtttccagtgttctctggctgtttccaagagctacaagaaaagaataaatctctggagttggtgtcctttgaggaggtagctgtgcacttcacctgggaggagtggcaggacctggatgacgctcagaggaccctgtacagggacgtgatgctggagacctacagcagcctggtatcattggggcattgcattaccaaacctgagatgatcttcaagctagagcaaggagcagagccatggatagtagaagaaaccctaaacctgagactttcaggtggaagcaagaagcaagttttctcaggtatttgccacaggagcctggtggagctccaggaggtttgatctctcttgtgaactctggaactgtattcccaattgtcaattggacatccctacgtatgggacctcagatatttcaaacatgatgtgtccaagtctgtatcacttctggccatcatattgttcttttatttttccaaatttcacatcaccagtaacaaactagctgtgatcatggcagatagcctggaaataaaactcccctttttaccctttgcacagcaaattgacatcaaatcctgtttctactttttttttttttaactattgcttccctattctgtattctcactgctccatctcctgatgtaggaggtcatctgttttcctcttttcctctcctctgactcttaagccctttcccattctctttctcaggaatggctgttaaaatgccaatatggtcttgtaactttcctgtacttagtgaacctccttatttacaccctgtttgtgaagtggctgtgttcaccctgggtggacacggaatgtttttgtcatgtacaaagagaattttatgctgcctgtgtacagttattaatttgtaagtacactcagctttttgtatctgtaggtttaatatctgtgtatgtaagcaaacttggatgcaaaatatttgaaataaaatcagatgcttgcatctgtagtg

SEQ ID NO: 7452 - DNA, 321 bp, Homo Sapiens
  XM_936240
atgtcccgctacctgcgtccccccaacacgtctctgttcgtcaggaacgtggccgacgacaccaggtctgaagacttgcggcgtgaatttggtcgttatggtcctatagttgatgtgtatgttccacttgatttctacactcgccgtccaagaggatttgcttatgttcaatttgaggatgttcgtgatgctgaagacgctttacataatttggacagaaagtggatttgtggacggcagattgaaatacagtttgcccagggggatcgaaagacaccaaatcagatgaaagccaaggaagggaggaataagatcgtatag

SEQ ID NO: 7453 - DNA, 355 bp, Homo Sapiens
  XM_936248
tgtaatatcaattttattttttaggaatctggtgaacagtaacaaactttggtgaaatttcaggaaccctagccattgaaatggatgagggaacctatatacatgcactcgacaatggtctttttaccctgggagctccacacaaagaaggtttgtgtctggaacggaagatcctgccacaagtgtagattttaggacattcattcacttaggccaaactctaactagtctcaaacattttccaaaggaatggaaccattgcatttgactcttccatttttttaaattccttaatatttaccagccattggcaagtccctctttctaatataagcatttgaaaacattccgtata

SEQ ID NO: 7454 - DNA, 1419 bp, Homo Sapiens
  XM_936251
atgtatgcctttagcagctggatgtctcgtcgacgcggccgcgtcaaggaccgcacccagattgccatctgccccaacaaccatgaggtgcatatctatgaaaagagcggtgccaaatggaccaaggtgcacgagctcaaggagcacaacgggcaggtgacaggcatcgactgggcccccgagagtaaccgtattgtgacctgcggcacagaccgcaacgcctacgtgtggacgctgaagggccgcacatggaagcccacgctggtcatcctgcggatcaaccgggctgcccgctgcgtgcgctgggcccccaacgagaacaagtttgctgtgggcagcggctctcgtgtgatctccatctgttatttcgagcaggagaatgactggtgggtttgcaagcacatcaagaagcccatccgctccaccgtcctcagcctggactggcaccccaacaatgtgctgctggctgccggctcctgtgacttcaagtgtcggatcttttcagcctacatcaaggaggtggaggaacggccggcacccaccccgtggggctccaagatgccctttggggaactgatgttcgaatccagcagtagctgcggctgggtacatggcgtctgtttctcagccagcgggagccgcgtggcctgggtaagccacgacagcaccgtctgcctggctgatgccgacaagaagatggccgtcgcgactctggcctctgaaacactaccactcgtggcgctgaccttcatcacagacaacagcctggtggcagcgggccacgactgcttcccggtgctgttcacctatgacgccgccgcggggatgctgagcttcggcgggcggctggacgttcctaagcagagctcgcagcgtggcttgacggcccgcgagcgcttccagaacctggacaagaaggcgagctccgagggtggcacggctgcgggcgcgggcctagactcgctgcacaagaacagcgtcagccagatctcggtgctcagcggcggcaaggccaagtgctcgcagttctgcaccactggcatggatggcggcatgagtatctgggatgtgaagagcttggagtcagccttgaaggacctcaagatcaaatgacctgtgaggaatatgttgccttcatcctagctgctggggaagcggggagaggggtcagggaggctaatggttgctttgctgaatgtttctggggtaccaatacgagttcccataggggctgctccctcaaaaagggaggggacagatggggagcttttcttacctattcaaggaatacgtgcctttttcttaaatgctttcatttattgaaaaaaaaaaaaaatgcccccaaagcactatgctggtcatgaactgcttcaaaatgtggaggtaataaaatgcaactgtgtaaaaaaaaacaaaaaa

SEQ ID NO: 7455 - DNA, 2196 bp, Homo Sapiens
  XM_936265
atgggacagctgaaggccaggtgttctgggatgatggacaaagcattgaacatcctgcaaatccagaccatacacaataagtatttgagtgactcgaatccactaaaagttgggtatattagaatctggggtgtgaatacctatgtgacacaagtcagtttcacctatgacaaccggcaatttatggagacaaatttcaagagtgaaccttataatcagatactaactattcaattgactgacaagactatcaacctggaaaagttaactgaggttacttggattgatggtggtcctgtacttcctactccaactaagacaagtaccatcccaatgagttctcatccttctccatctactaccaatgccaccagttctgagacaatcaccagttctgccagtgcaaatactaccactggcactactgatactgttcctatcacaaccacatctttcccaagtactactagtgttacaactaatactactgttcctgatacaacttctcctttccctacaagtactactaatgctagcactaatgctactgttcctatcacaaccacacctttcccaacaagtactattggtgttacaactaatgctactgttcccaatacaactgcccctttcccaacaaatgctagtactgctagcactaatgctactgttcctatcacaaccacatgttttgcaacaagtactattggtgttacaactaatgctactgttcccgatacaactgcccctttcccaacaaatactactactgctagcactaatgctactattcctatcacaaccacaccttttgcaacaagtactattagtgttacaactagtactactgttcctgatacaactgctcctttccctacaagtactactagtgctagcactaatgctacccctgttcctatcacaaccacactttttgcaacaagtactattggtgttacaactggtactactgttcctgatacaactgctcctttccctacaagtactactagtactagcactagtgctactgttcctattacaaccacaccttcccctacaaatactgctgatgctaacactagtaatactgttcctaataccactatgccttctcctacaagtagtactactgtgagtactattgctaccgttcccatttcagtgactccttctctgacaagtactgctgatgccaccattagtactactgtacttattgccactacttcttctctaacaggtactactgatgttagcactagtactactattaataatataagtactcctgttcaaacaaatactactaatgctagcactagtactaatgttgctaatataactgctacctctcatacaagtactgatgatactgttcctaataatactgttccagttacagctattccttctcttgcaaatactggtgttgacactactagcaacagtttttccattatgaccacttctttctctgaaagtactaatgctatgaacactactgttattatggcaactacttctcctacaagtactgatgttgctagcacaaataatgatgcttctatgacaaattttcttttagctacaatgtctgctggtaatataactagtaatagtatttccataacaactacttcttttggtaatagtgttccttttgtgactactccttctccaagtactgatgctactactacaagtaataatactaatcctggcatgactacttattaccagacttctcctaccattcctacccatactcttacttctattcctagctctattacttctattttgagcatgtttccaacaagtaatacattcactactgataaaattactaattttactacccctacaaatgcaaacaccattattttcaacactcttgatacaaaaagtaccatggtaatagatgctacggtcactactaccagcaccaaagataataccatgagtccagatacaacagttacttccatagacaaattcaccacacacatcacacagttcgctactccccattctgctactactacaacactggccttaagccacacctcattagctcctacaaatctttctaatctaggcaccatggatattactgatgcagataactccagcagtgttacaggatacccagaaacagtcaaggaagaggagaaggagaatatggaagtgtaa

SEQ ID NO: 7456 - DNA, 532 bp, Homo Sapiens
  XM_936316
tgcctgtggggccatgggagctcaaaatgcccctcctttcctccacaggaccagatgcctgagctaggaaaggcctcattcctgctgtgatcctgccatggatacctggctcgtatgctgggcaatttttagtctcttgaaagcaggactcacagaacctgaagtcacccagactcccagccatcaggtcacacagatgggacaggaagtgatcttgcgctgtgtccccatctctaatcacttatacttctattggtacagacaaatcttggggcagaaagtcgagtttctggtttccttttataataatgaaatctcagagaagtctgaaatattcgatgatcaattctcagttgaaaggcctgatggatcaaatttcactctgaagatccggtccacaaagctggaggactcagccatgtacttctgtgccagcagtgaagccacagccttgcaaagacaactccagcctgtgcaaaatccctcacagagctgcctccctcccagccgccagctcccacttcctgcctaa

SEQ ID NO: 7457 - DNA, 1681 bp, Homo Sapiens
  XM_936354
atgattcccactcacaagcaagaacaagaagggaaaatattggtgggaaggaagctagagtgtaggctgaagggaacccaaaacactagacagaagaatcttgaagctggaggagaaacgggagctgctagactacttctcacaatctccttgtttaccctgaaatcaagagtcacctcttcccactccatctgccagcttctcgggtgctctgaagcgcgcgccccccgctcaactgggcattggcttcaccacggacgtggtgtgggtaccctatccctctccccgcgtggtgctgcagcgatttcgggacctgtcacccttctctgggccacaagcccgaccctctccgcccagggaaggagggcggatcccagcctatccccagccccaggtgcgcgagcgccaggcccaggcggggccttgcggcccggagctgagccccgagcccgggctcctccaggaggcgtcggcggtgcctgggtccagccaggccgcgacctagctcgggagcctccccgcgacctgccgatccccagctgcgcgaagcccacggagcacttccagcagcagggcccggcgggacctgccgcacggagcctgcgggctcggatcctccaggccaggactttccttttcccccgggcggtacggttgctgggctgctgcctcaccggcccaggaattgggagacgcccgcactcacgtgggagtcttagaggtggaagtcgagcgacggtggagaacagttgcccgttttatctgcataacgtcaatgaaggttgtcggcatgttgtagtctcagttctggtaatgggaaacccaggaactttcaaaagaggccttttactctcagctttgtcgtatttgggttttgaaacttaccaggttatctctcaggctgctgtggttcatgccacagccaaagttgaagaaatacttgaacaagcagactacctgtatgaaagcggagaaacagaaaaactttatcagttgctaacccaatacaaggaaagtgaagatgcagagttactgtggcgtttggcacgggcatcacgtgatgtagctcagcttagcagaacctcagaagaggagaaaaagctattggtgtatgaagccctagagtatgcaaaaagagcactagaaaaaaatgaatcaagttttgcatctcataagtggtatgcaatctgtcttagtgatgttggagattatgaaggcatcaaggctaaaattgcaaatgcatatatcatcaaggagcattttgagaaagcaattgaactgaaccctaaagatgctacttcaattcaccttatgggtatttggtgctatacatttgccgaaatgccttggtatcaaagaagaattgctaaaatgctgtttgcaactcctcctagttccacctatgagaaggccttaggctactttcacagggcagaacaagtggatccaaacttctacagcaaaaacttacttcttttaggaaagacatacttgaaactacacaacaaaaagcttgctgctttctggctaatgaaagccaaggactatccagcacacacagaggaggataaacagatacagacagaagctgctcagttgcttacaagtttcagtgagaagaattgagaacttttcagagaagatttatgaaatagctaataaacattgccttttcttttaa

SEQ ID NO: 7458 - DNA, 4972 bp, Homo Sapiens
  XM_936372
atgaggcaagtgctgtggttgtgtaatgtctgcgtaaccgcacgggaaacccgccaccacctccacctccctgccatcctcgacaagatgcctgcccccggcgccctcatcctccttgcggccgtctccgcctccggctgcctggcgtccccggcccaccccgatggattcgccctgggccgggctcctctggctcctccctacgctgtggtcctcatttcctgctccggcctgctggccttcatcttcctcctcctcacctgtctgtgctgcaaacggggcgatgtcggcttcaaggaatttgagaaccctgaaggggaggactgctccggggagtacactccccctgcggaggagacctcctcctcacagtcgctgcctgatgtctacattctcccgctggctgaggtctccctgccaatgcctgccccgcagccttcacactcagacatgaccacccccctgggccttagccggcagcacctgagctacctgcaggagattgggagtggctggtttgggaaggtgatcctgggagagattttctccgactacacccccgcccaggtggtggtgaaggagctccgagccagcgcggggcccctggagcaacgcaagttcatctcggaagcacagccgtacaggagcctgcagcaccccaatgtcctccagtgcctgggtctgtgcgtggagacgctgccgtttctgctgattatggagttctgtcaactgggggacctgaagcgttacctccgagcccagcggccccccgagggcctgtcccctgagctaccccctcgagacctgcggacgctgcagaggatgggcctggagatcgcccgcgggctggcgcacctgcattcccacaactacgtgcacagcgacctggccctgcgcaactgcctgctgacctctgacctgaccgtgcgcatcggagactacgggctggcccacagcaactacaaggaggactactacctgaccccagagcgcctgtggatcccactgcgctgggcggcgcccgagctcctcggggagctccacgggaccttcatggtggtggaccagagccgcgagagcaacatctggtccctgggggtgaccctgtgggagctgtttgagtttggggcccagccctaccgccacctgtcagacgaggaggtcctcgccttcgtggtccgccagcagcatgtgaagctggcccggccgaggctcaagctgccttacgcggactactggtatgacattcttcagtcctgctggcggccacctgcccagcgcccttcagcctctgatctccaattgcagctcacctacttgctctccgagcggcctccccggcccccaccgccgccacccccaccccgagacggtcccttcccctggccctggccccctgcacacagtgcgccccgcccggggaccctctcctcaccgttccccctactggatggcttccctggagccgaccccgacgatgtgctcacggtcaccgagagtagccgcggcctcaacctcgagtgcctgtgggagaaggcccggcgtggggccggccggggtgggggggcacctgcctggcagccggcgtcggcccccccggccccccacgccaacccctccaaccctttctacgaggcgctgtccacgcccagcgtgctgcctgtcatcagcgcccgcagcccctccgtgagcagcgagtactacatccgcttggaggagcacggctcccctcctgagcccctcttccccaacgactgggaccccctggacccaggagtgcccgcccctcaggccccccaggccccctccgaggtcccccagctggtgtccgagacctgggcctcccccctcttccctgcgccccggcccttcccagcccagtcctcagcgtcaggcagcttcctgctgagcggctgggaccccgagggccggggcgccggggagaccctggcgggagaccctgccgaggtcttgggggagcgggggaccgccccgtgggtggaagaagaagaggaggaggaggagggcagctccccaggggaagacagcagcagccttggaggtggcccaagccgccggggtcccctaccctgtcccctgtgcagccgcgagggggcctgctcctgcctgccactggagcggggggacgccgtagcaggctggggaggccaccctgctcttggctgcccccacccccccgaggacgactcctcgctgcgggcagagcggggctccctggccgacttgcccatggccccccccgcctcggccccccccgagtttctggaccccctcatgggggcggcggcgccccagtaccccgggcgggggccacctcccgctcccccccccccgccgccacctcctcgggcccccgcggacccggccgcgtcccccgaccccccttcggccgtggccagtcccggttcaggcctctcgtcgccgggccccaagccgggggacagcggctacgagaccgagacccctttttccccagagggagccttcccaggtgggggggcggccgaggaggaaggggtccctcggccgcgggctccccccgagccacccgacccaggagcgccccggccacctccagacccgggtccgctcccactcccggggccccgggagaagccgaccttcgtggttcaagtgagcacggaacagctgctgatgtccctgcgggaggatgtgacaaggaacctcctgggggagaagggggcgacagcccgggagacaggacccaggaaggcggggagaggccccgggaacagagagaaagtcccgggcctgaacagggacccgacagtcctgggcaacgggaaacaagccccaagcctgagcctcccagtgaacggggtgacagtgctggagaacggggaccagagagccccaggcatcgaggagaaggcggcggagaatggggccctggggtcccccgagagagaagagaaagtgctggagaatggggagctgacacccccaaggagggaggagaaagcgctggagaatggggagctgaggtccccagaggccggggagaaggtgctggtgaatgggggcctgacacccccaaagagcgaggacaaggtgtcagagaatgggggcctgagattccccaggaacacggagaggccaccagagactgggccttggagagccccagggccctgggagaagacgcccgagagttggggtccagcccccacgatcggggagccagccccagagacctctctggagagagcccctgcacccagcgcagtggtctcctcccggaacggcggggagacagcccctggcccccttggcccagcccccaagaacgggacgctggaacccgggaccgagaggagagcccccgagactgggggggcgccgagagccccaggggctgggaggctggacctcgggagtgggggccgagccccagtgggcacggggacggcccccggcggcggccccggaagcggcgtggacgcaaaggccggatgggtagacaacacgaggccgcagccaccgccgccaccgctgccaccgccaccggaggcacagccgaggaggctggagccagcgcccccgagagccaggccggaggtggcccccgagggagagcccggggccccagacagcagggccggcggagacacggcactcagcggagacggggacccccccaagcccgagaggaagggccccgagatgccacgactattcttggacttgggaccccctcaggggaacagcgagcagatcaaagccaggctctcccggctctcgctggcgctgccgccgctcacgctcacgccattcccggggccgggcccgcggcggcccccgtgggagggcgcggacgccggggcggctggcggggaggccggcggggcgggagcgccggggccggcggaggaggacggggaggacgaggacgaggacgaggaggaggacgaggaggcggcggcgccgggcgcggcggcggggccgcggggccccgggagggcgcgagcagccccggtgcccgtcgtggtgagcagcgccgacgcggacgcggcccgcccgctgcgggggctgctcaagtctccgcgcggggccgacgagccagaggacagcgagctggagaggaagcgcaagatggtctccttccacggggacgtgaccgtctacctcttcgaccaggagacgccaaccaacgagctgagcgtccaggccccccccgagggggacacggacccgtcaacgcctccagcgcccccgacacctccccaccccgccacccccggagatgggtttcccagcaacgacagcggctttggaggcagtttcgagtgggcggaggatttccccctcctcccccctccaggccccccgctgtgcttctcccgcttctccgtctcgcctgcgctggagaccccggggccacccgcccgggcccccgacgcccggcccgcaggccccgtggagaattgattccccgaagacccgaccccgctgcaccctcagaagaggggttgagaatggaatcctctgtggatgacggcgccactgccaccaccgcagacgccgcctctggggaggcccccgaggctgggccctccccctcccactcccctaccatgtgccaaacgggaggccccgggcccccgccccccagccccccagatggctcccctgacccccctgaccccctcggagccaaatgaggcaggaatccccccgcccctccatagagagccgcctttctcggaactgaactgaactcttttgggcctggagcccctcgacacagcggaggtccctcctcacccactcctggcccaagacaggggccgcaggcttcggggacccggaccccccatttcgcgtctcccctttccctccccagcccggcccctggaggggcctctggttcaaaccttcgcgtggcattttcacattatttaaaaaagacaaaaacaactttttggaggaa

SEQ ID NO: 7459 - DNA, 501 bp, Homo Sapiens
  XM_936374
atgggctgcaggctgctctgctgtgcggttctctgtctcctgggagcggtccccatggaaacgggagttacgcagacaccaagacacctggtcatgggaatgacaaataagaagtctttgaaatgtgaacaacatctggggcataacgctatgtattggtacaagcaaagtgctaagaagccactggagctcatgtttgtctacaactttaaagaacagactgaaaacaacagtgtgccaagtcgcttctcacctgaatgccccaacagctctcacttattccttcacctacacaccctgcagccagaagactcggccctgtatctctgtgccagcagccaagacacagccttgcagagtcaccgctttcctgtgcagaaaccttaggggccctccaggaagctgtgggggccaccaaagccttcgatgaacatttcctacaagagccccggcagaagattcagaacatcatagcacctttaatggcataaaatatctagc

SEQ ID NO: 7460 - DNA, 1245 bp, Homo Sapiens
  XM_936467
tggcgtcagagccgtcgtggctcgttccattctcggcggtggtacctgctcccggtggccctgaggacgtgtgggccaggggcggccccgaaattaggaagcggagggggagcagtctgcaggtctgcggggctaagtgtcgcggcggcgcacctcgcgtcaagaatccggaggaggagactgcaaggataggcccaggagtaatggagtccaaagaggaactagcggcaaacaatctcaacggggaaaatgcccaacaagaaaacgaaggaggggagcaggcccccacgcagaatgaagaagaatcccgccatttgggagggggtgaaggccagaagcctggaggaaatatcaggcgggggcgagttaggcgacttgtccctaattttcgatgggccatacctaataggcatattgagcacaatgaagcgagagatgatgtagaaaggtttgtagggcagatgatggaaatcaagagaaagactagggaacagcagatgaggcactatatgcgcttccaaactcctgaacctgacaaccattatgacttttgcctcataccttgaatcctaaaagttttcgctgaggttaatgtgaacactgctttacaagcttgtatttttgtgatttactttttctgtaagccttttggtgtttacacttaccagtttctaatggaaattagaattctaattgaatattgttttgtctcagcctaaaagttacggtcagcatggcaattcacctattttaggaaaaatactcttttcataatatgaaatgcataaagcagttcaaaaagcagtctgtattccatcatcttcctttttcattccagtccttatttttgtaagtattacttttcctcctccggctacctggactcaaaatctcagttgtctttgacagtttttttcttgtccctgaccaaaaaagaatgatcatacccagaattcaatgtttgatattttaagaatgtatgttctagtgtttttcagagtgagtctaccatctgtataaaaacaccttgggggcaggcaggggcatttaaaaatgtaggacctatcgtccagactcacagagtggggctccagaatctccatttttaacaaactctcttaagtaattctgatgtgtaccaaaatcagtgccattggtgtgtgtgtacgtaactatatacatatgtgtgtgtgtgtatatatataatgtgtcataaccgtaaacaataaacaatatcaagataaa

SEQ ID NO: 7461 - DNA, 2625 bp, Homo Sapiens
  XM_936495
atggtgtccttcgctgtagtagagaagaaaagcaatgaatcggtagacattgcgaaccaggttatgaagtgcaaggctgcagttgcttgggaggctggaaagcctctctccatagaggagatagaggtggcacccccaaaggctcatgaagttcgaatcaagatcattgccactgcggtttgccacaccgacgcctataccctgaggggagctgatcctgagggttgttttccagtgatcttgggacatgaaggtgccggaattgaggaaagtgttggcgagggagttactaagctgaaggcgggtgacactgtcatcccactttacatcccacagtgtggagaatgcaaattttgtctatatcctaaaactaacctttgccagaagataagagtcactcaagggaaaggattaatgccagatggtaccagcagatttacttgcaaaggaaagacaattttgcgttacatgggaaccagcacattttctgaatacacagttgtagctgatatctctgttgctaaaatagatcctttagcacctttggataaactctgccttctaggttgtggcatttcagctggtgatggtgctgctgtgaacactgccaaggtggaacctggctctgtttgtgccgtctttggtctgggaggagttggattggcagttatcacgggctgtaaagtggctggtgcatcccggatcattggtgtggacatcaataaagataaatttgcaagggccaaagagtttggagccactgaatgtattaaccctcagggttttagtaaacccatccaggaagggctcattgagatgactgatggaggagtggactattcctttgaatgtattggtaatgtgaaggtcatgagagcagcacttgaggcttatcacaagggctggggagtcagcgtggtggttggagtagctgcttcaggtgaagaaattgccactcgtccattccagctggtaacaggtcgcacatggaaaggaactgcctttggaggatggaagagtgtagaaagtgtcccaaagttggtgtctgaatatatgtccaaaaaaataaaagttgatgaatttgtgactcacaatctgtcttttggtgaaattaacaaagcctttcaactgatgcattctggaaagagcattcgaactgttgtaaagatttaattcaaaagagaaaaataatgtccaacctgtcgtgatgtgatgggagcagcttaacaggcagggagaagcgcctccaaactcacagcctcgtagagcttcgcagctaccccagagaatagtgttatgagtgtaattcatgaatctctataatcaacgacaaggataattcagtcatggacctgttttctggacgctcctccacataaataattgctagcttattaaggaatattttaacataataaaagtaatttctatatttgtgtagaaattgtctttgttttatgctgtaatcattgtcatggtttgtctgcccattatcttcattctgtaagggaaatgtaaaggaagcagggcagtggtgggtgtctgaaacctcagaaacattcgttgaagttttaagggtctcagtcccgttgattgaagaacagatcctagccatcagtgacaaagttaatcaggagccaagtctgcttctgtgatattatcttgaagggaggtactgtgccttgttcgtgcctgtaccccaaattcctagtatggcatctgcccctcaggggacactaaaatgtattattgaaacagcattctggacttaaataggtgtatgtgtgtgttggttgtggctgtactatttctagtatagtgaattacatactgaatatccaagttctcagcacctacttttgtcaaatcttaacattttgccacttccacatcacattgccattcctcccctccagaggtaacaattatccaaaatttgatgtttgtcattcctgtgttgttgtactttcactgtgtataacctaaaccatctactctttagtactgttttatatatttttaagccttatacttgctcattctacagcttttctttttttcactcattattgtataattatatgtgaagctttcattcattaattttagtactgtgtagcagtattcaattacgcgaactatcttaattcatctgttctccagttgaaggcatgaagttgttgccagtttctgtattacaacactgtagtggaacattcttctgcattgggctcactacattagttacttaagatgtgtatcacagaataaacacatttagccttatagacattgccaaatttatcttcaaagtaaatgtgagtttttgtgaattacgtgagtgtagaatggtgttttattatgagtttagtttgcattttccacaattactcattaaatccttcattctaatggacattttattgtgaagaacctgttcatatcctgtgcccaactttgtattgaattatttctttttctctgagtaatttttaggagttcttttattctagacatcaatcatttgtcagttttatatgttgcaaatatcttctagtctatctagtgacttttctttttactttatggtattttgttgaataaagttttaatgtagtcaaataa

SEQ ID NO: 7462 - DNA, 1695 bp, Homo Sapiens
  XM_936496
atgggggcctcttctccaagaagcccggagcctgtcgggccgccggcgcccggtctccccttctgctgcggaggatccctgctggcggttgtggtgctgcttgcgctgccggtggcctggggtgagaggcgggcgggcgtggggaggcgcccgggcggacgaggaacccggggccccgcagagaactcgcgtgcagcgctgagctgcgctgctctgcgcgcccgggtccgaaggcagcgcgatgggtgggctgagcgcgcgacccggcagggcggcgggtgtaggatccttctgcgcactggagaccctcggtgcttctgggtaagcgtggagttcccaggtcaatgcaatgccccagaatggcttccatttgccaggcctaccaacctaactgatgagtttgagtttcccattgggacatatctgaactatgaatgccgccctggttattccggaagaccgttttctatcatctgcctaaaaaactcagtctggactggtgctaaggacaggtgcagacgtaaatcatgtcgtaatcctccagatcctgtgaatggcatggtgcatgtgatcaaaggcatccagttcggatcccaaattaaatattcttgtactaaaggataccgactcattggttcctcgtctgccacatgcatcatctcaggtgatactgtcatttgggataatgaaacacctatttgtgacagaattccttgtgggctaccccccaccatcaccaatggagatttcattagcaccaacagagagaattttcactatggatcagtggtgacctaccgctgcaatcctggaagcggagggagaaaggtgtttgagcttgtgggtgagccctccatatactgcaccagcaatgacgatcaagtgggcatctggagcggccccgcccctcagtgcattatacctaacaaatgcacgcctccaaatgtggaaaatggaatattggtatctgacaacagaagcttattttccttaaatgaagttgtggagtttaggtgtcagcctggctttgtcatgaaaggaccccgccgtgtgaagtgccaggccctgaacaaatgggagccggagctaccaagctgctccagggtatgtcagccacctccagatgtcctgcatgctgagcgtacccaaagggacaaggacaacttttcacccgggcaggaagtgttctacagctgtgagcccggctacgacctcagaggggctgcgtctatgcgctgcacaccccagggagactggagccctgcagcccccacatgtgaagtgaaatcctgtgatgacttcatgggccaacttcttaatggccgtgtgctatttccagtaaatctccagcttggagcaaaagtggattttgtttgtgatgaaggatttcaattaaaaggcagctctgctagttactgtgtcttggctggaatggaaagcctttggaatagcagtgttccagtgtgtgaacaaatcttttgtccaagtcctccagttattcctaatgggagacacacaggaaaacctctggaagtctttccctttgggaaaacagtaaattacacatgcgacccccacccagacagagggacgagcttcgacctcattggagagagcaccatccgctgcacaagtgaccctcaagggaatggggtttggagcagccctgcccctcgctgtggaattctgggttag

SEQ ID NO: 7463 - DNA, 1864 bp, Homo Sapiens
  XM_936687
tctcagcgcaaccaggccatgggagtgctccatcccctgcctcgcagttactgattctccaagccgggcgccgcccagtcctggtggggcttcccccacccctctccgcgccgggaaatcgcgcgctctttctttacctgcgctccactggtgggcagcgtatgctcccgcgtcgacagctctgtttcgccttccggtccccatagctctgcaggggaacaggatcgctggcgcctcctgggccgctaagcgaccccggggctgcccggcttagcgagtgcttcgcagagaggtagccgagtcgaggcagcgcggttcccaaggaagtcacggctgcggccaccctccagttcggacctccgggcagccgcggttgctttcagtctctgcccattgagacaaaagagcgtgacaagccgcgcgacgcggccaatcagcggggcgaggaggcggcctccccaagcagcctctggccctgaagctactgctagcaagactcgggagctggctggcgggggctgaggccgacaggcacgggagccggcgcggcgtcaagtggagctcggacgcacggaccaggcccatttccctttcatctacagcaatgttcttactcctctcctgctgtaaagccactcatcttcgatttccctgaggacttctgctcctacagactctcgacggagtaaagcttccgatagaggggaaacagattcgctactagtgttgatagtcaagttactaaggttctttatcaacgtctcggagcagatttgagaggcccctgaatcgtcccgggaattttcttcggtgagcatttgtggagactctgggatgtaggttggattaaacttctgtgatgggtccatcggcgtcttgacacaacactaagcttctcctggatctttgaaacgtagcagaaactgatgacggagcctcaaattgctacaaggtagcccggaaagagcaagagtgagtgtacttcggatgaagggaatgtggaccctcaggactaaagcagtgggagaggcctgggaggtggggcctggggagggcgaggtctgctctgaagtcaccaagctcctgatcttagaagagatggtgggcgcaggctctggaggctcaagcggaggaggggaaggaggcgagtccggaaaccctcggccaatcagagagggctggggcggcgcctgctagaaggcttagcactgcagggctctgggcgggaaggctaacctggtgcggagccagcctgggtctcagccccgcgtacggcctttcacgagtcttcaagccttcaggctttcttctagtcaagatgagtgataaaccagacttgtcggaagtggagaagtttgacaggtcaaaactgaagaaaactaatactgaagaaaaaaatactcttccctcaaaggaaactatccagcaggagaaagagtgtgttcaaacatcataaaatggggatctcctccaaagagcagatttcagcattgcctgacagtcttggttttaggcttgtttttttgtaaacctgtgtgtttgtagagatttcagacatcttctgatttcttctcacctatattccctggttaagaggtcaggggtagtgaatgtttccttaagttcctttttaaacttcccattggtatgtaaattccaaatggcagatgctgtcaataaccttgccatggatgacctttgtgtaggtagtccttgcacctcatgcaggataagccaattttaactttctacaatgggtgcctcaatagtttcataatcttcatgaagttgcatcctttggcagcttcttacagtttattttcacttccaatgtagcaataaaataataaatataatcgttgtt

SEQ ID NO: 7464 - DNA, 1212 bp, Homo Sapiens
  XM_936776
atgactgaattctatcaagaagatgaaatgaaactctataggaaattaacagtggaggaaaattaccgaatagaggaagaagagaagctttctaaagtggaagaaaagctcagccgtgccactgaacagctggagacctatagaaagctagccaaagatcttgaagaagaattggagagaactgttcatttttatcaaaagcaggttatttcctacgagaaaagaggacatgataattggttggcagctcggactgctgaaagaaacctcagtgatttaaggaaagaaaatgctcacaacaaacaaaaattaactgaaacagagttgaaatttgaacttttagaaaaagatcctaatgcacttgatgtttcaaatacagcatttggcagagagcatgccccgaatggtcccgcaccattgggtcagcgttcatctgaaacgagagcttttctctctcctcaaactttgttggaggatccactgggactctcacctgtgcttccggagggaggaggaagaggcccaagaggcccagggaatcccctggaccatcagattaccaatgaaagaggagaaccaagctgtgacaggttaaccgatcctcacagggctccttctgacactgggtccctgtcatctccggtggaacaggactgtaagatgatgtttcctccaccaggacaatcatatcctgattcagctcttcctcctcaaagggaagacagattttattctaattctgaaagactgtctggatcagcagaacccagaagttttaaaatgacttctttggataaaatggatgggtcaatgccttcagaaatggaatccagtagaaatgatgccaaagatgatcttggtaatttaaatgtgcctgattcatctctccctgctgaaaatgaagcaactggccctggctttattcctccacctcttgctccagtcagaggaccattgtttccagtggatacaaggggcccgttcatgagaagaggacctcctttccccccacctcctccaggaaccatgtttggagcttctcgagaatgtgagggcagggatgcagctgaaaagctggcggcccagacagaagtctgccccaagcagcctgagccctcaggcaccccccagctccctgggagctcccctccacctgccaacgtcagtgccacactggtgtctgaaaggaaaaacaggaacaggacagactaa

SEQ ID NO: 7465 - DNA, 1221 bp, Homo Sapiens
  XM_937206
atgggtaagggctggctgttccggaagattctggcctctcccagtgtgtttcggcgcgagggcaccgctggcccagcaggtggccccccggggccggcacgggccccgacagccgcccccttccctgaacctcggcggcccagtccccgcttacctgaggggtggagccggcagcctgcggagccactggccaagctgggaagtccggcgcaactccgcaccgcagagccggcgcctcctcggcaggtaagagccgcagccccgccgcccgccgcctggcggcccctgacccctgggccgcgtgcccaccacccaacttgttggccagcgtgcttctcccagcgccgcaggcctgagctcccggaacgcgcccagggggcctggccaaaggccgtagtgggcgctctggattccgggatgcgccaggggttacttccggaagcgcagcctgcgggggtcttcgcgcgcaccccccgcctcgcagttggtacgttcctcctacctgcggcgcctgagtgcgcaggcgtgggcagcgaggcggtgcggccggaagcgaaggggccgtgccagtctccggacggatggcggcctagatttcctcccggactcggtggcacccaaggccccctgcacgccggcgctgtgcgtgccaggctgaccgcccgagtgcgacccggacctcgtccgcacgtgcagatggaaggggccacaaagacgataaggatccaggtctcccgcgtggaaggctcatctatcgtgaatgttttcttacagacagaacctccactcaatacaccagaaaacagagagtatcttgcagaaattatgtttgaatcatttaacgtaccaggactctacattgcagttcaggcagtgctggccttggcggcatcttggacatctcgacaagtgggtgaacgtacgttaacggggatagtcattgacagcggagatggagtcacccatgttatcccagtggcagaaggttatgtaattggaagctgcatcaaacacatcccgattgcaggtagagatattacgtatttcattcaacagctgctaagggagagggaggtgggaatccctcctgagcagtcactggagaccgcaaaagccattaagaatcaggaggcgaccacagcagcagaacactgccaccctaggatccagagctattgcacaaaattcacacacaggtgtggctgtgacgtgtggccataa

SEQ ID NO: 7466 - DNA, 3195 bp, Homo Sapiens
  XM_937221
tcctgaccagaatcatctcccagctccaagaagcccatgaggagaagaatgaactggagtgtgccctaaaaaggaaaattgctgcttatgatgaagaaatccagcatctctatgaggagatggaacaacaaatcaaaagtgagaaggagcagtttctcctgaaggacacagagaggtttcaagcccgcagtcaagagctggagcagaaactgttatgtaaggagcaggagctggagcagctcacccagaagcagaaaaggctggaaggtcagtgcacagccctgcatcatgacaagcatgagaccaaggctgagaataccaagctgaaactcactaaccaggagctggcccgggagctggagcggacttcctgggagctccaggatgctcagcagcagttggaaagcctccagcaagaggcctgcaaactccaccaagagaaggagatggaagtgtaccgtgtgacggagagtctacagcgtgagaaggccgggctcctcaagcagctggatttcctaaggtgcgtcggtgggcactggcctgtgctgagagcacctcccagaagcctggggtcggaaggaccagtctgagggtcatccttgcctacgtgctggaaaaacgtgcctgctgagagagtgccctcaattcccttggtccccagtgcagtgtttggaccaccgagtagccactctattatgtttgggaaaggaacaagcaccttcgggatgaacgggacatatgttttcagaaaaataaggcagccaaggcaaacacagctgcttccagggcaagttggaaaaagagatctggctctgtgataggcaaatatgtggacagcagagggattcttaggagtagccagtcagaggaggaggaggaggtgtttggcatcccaaggagaagctccctgggcctgagtggatatcccctaacagaagaggagccaggaaccggggagccagggcctgggggtccgtacccccggccgctccgcagaatcatctccgttgaagaagaccccctgccccagctcctggatggtggctttgagcaacccctgagcaaatgctcagaagaggaagaggtctctgaccagggggtacagggacaaatcccggaggccccacccttgaaactcacccccacatccccccgagggcagcctgttggaaaagaagccctgtgtaaggaggaaagctctccctctgcccctgaccggctcttcaagattgtgttcgtgggcaattccgcggtggggaagacatccttcctgaggagattctgtgaggaccggttctccccaggcatggcggccactgtgggcattgattaccgtgtgaagacgttgaatgtggacaactctcaggtggccctgcagctgtgggacacggctgggcaggagaggtaccggtgcatcacccagcagttcttcagaaaggcagatggtgtcatcgtcatgtacgatctcacagacaagcagtcgttcctgtcggtccggcggtggctgagcagcgtggaggaagctgtgggagaccgggtgcctgttcttctgctgggtaataagcttgacaacgagaaggagcgggaagtcccccggggcctcggagagcagcttgccacggagaacaatctgatcttctatgaatgcagcgcctactctggtcacaacaccaaagagtccctgctccatctggccaggttcctcaaggagcaagaagacacagtgagagaggacaccattcaggtcggccaccctgctaagaagaaatcctgctgtggctgatagggtcctacaaggactgcccccagcaaacctgaggtcacagagcctgccctgatcctgcacacggctcctgcacagatgccacccaccggggcccgcccagtccttttctttgtcagtcactcacctcccccaaaaggaagggaagcacatcccatcaggagagctgctcttggagcatctcagagtcttttctctcctttctctttctagaccccagatgcctgtccctgctttgttgttgttgttgttttccccgacttagtttcctaggggaaagaaacagatgggcttttccagaaaagccaccacgtgccttctccacgcccccttctcctccccttgcccttaggagcctcagcactgctgttgccgtgacaactatgcagggctcgacttgcggcttcctgcaggccaaagacagtgtggtgcccaacaaagcatccgtctcaacaccccgcggcctccccagctgccactagtagcaatccattacccacaggcagctcaacaactcaatgtgacttgggctccacgcctctacacaaaagatgcttccctgccctgttctcctccttcctgttgtgaaagcagcctcccttgcccttacccagctgtggctctctcagcggcttcctctagccccaaaggcctgctcagaataaggacctgcacacaagttgtgtggccctgggcaaaacctggagctgcttgatgttctgagcctgctttcaaatctgcaaaatagtgctctctgccttactccctcgcaggctcgtgtgaaggtcaaaagagaactcctgggaaagagcttagtcagctgaaaggctctaaacaaatgatagttattacatcgtcctctgtctccccatgcaagagaccagaacaaaacaatatacaaaagagagagaaaatcccacacctcttggtaactggaaaggctgaggccatgggtgagagcacctcccatttccctgggaaaggagaataagtaaaacttgaattccttcaattagagactcatctaagaatcctttctatcttcccactctgttttgaagtaggacagggggcccagcatcacagacgacaaggttcttaccttgtagttctggtctcatttgtttctgtatttatcaagcctggtacataaacacagtaggtaggtggatggatgaatttgctgtccggtcaagacttcagctagcacattcctaattgacctgcctttacatatatggtttctaaaacactttcacactgggatgatgacagagttctggagatggatggtggtgatggttgcacacactattgggaatatacttaatgacgttgaattgtacatttttaaatggttaaaattgtaaattttatggtatgtatattttaccacaataaaaaattttaag

SEQ ID NO: 7467 - DNA, 494 bp, Homo Sapiens
  XM_937239
ggtagtagtgggtgttttgaaacataaaaggttgcaccctcgtgtgtgcctgtgttaaaaggagcccacgcagccgacagcagcaggagcaaatggcctgctctgatggggacaggcaggaagtccttcggggcatttctgtttcatcacagcttttcctggggctggaagctgatcagtatctcctttggggacctgaaccctttccccgtacgccagatccggaaccgacgcgcctaccacttggagaaagtccggctggagctgaccgagctggaggccatccgtgaggacttcctgcatgagcgggacaccagccctgacaagggtgagctggtcagtgacgaggaggaggatacctgagtgggctccgggacgctgctcttcctgccttcacaaccaaagtgtgcccaaagggtgaaagtgcacttaaaagccagaatgtaacgtgtgtggcctctggggatctgctgggcagatgtcccaagccaggc

SEQ ID NO: 7468 - DNA, 261 bp, Homo Sapiens
  XM_937246
atggctggcaaggactaccccaatggcacctggctgggcgacgagaacaaccccgagatgcgggtacgctgcgccatcatcccctccgacatgctgcacatcagcaccaactgccgcacggccgagaagatggcgctaacgctgctggactacctcttccaccgcgaggtgcaggctgtgtccaacctctcggggcagggcaagcacgggaagaagcagctggacccgctcaccatctacggcatccggtgccactcttga

SEQ ID NO: 7469 - DNA, 1668 bp, Homo Sapiens
  XM_937260
cctatgcggacagcatgatgccaggtctgtgtcaggcatcggaaatgcagctgggtaggaaactagggctccttttgggaatgttgagttcaccatctaccggaggagaatgactgaaagtattggttgcgctcatgtcttttttgaccctcaacttgtagatgcattcaccctagtccaagaaaacctattggctttgcctgaccttttggccttagaaatgaccttcaaacactatagccatctcaggatagggatagcaatgatgtacaggaactggcacagaaggaattttctcctgtcacaaggcagaagttgtatggctcctgtgctacttgtcacagcaaacttaagcagatccagaaactgcctgaccctttactgtaccttcccactccaaaatggggaggggaactcctgtgcgggagtgctcagctctcaagggaagacagtcattaacctgtctaaactctatgttaatagaaccttctcgataattgctttcattaagtgtggttaatgtgaacagtacaagttatagcaagatttgcagaagaacaaagtaaatatttaagactttatttcaggatgcagttgggtcgaggcaaggagaagattagtagaagctgtatctgatggtatctgaggttgaaacacagtgaacctcttggcagaagtgccagtcatttctcatcagtggttcacagaatcctaactctggggaggcagatgggtgtctcctggagatggttgtgtgttcaggttttctcctttcgcttctggcctctgtcagacatgaatgacatggtgatgaagataaactgccttccctgtactgcccaggaatgcaatgaggattaagaaggtggcttttagcctgtgtctatgccacatggggaggatggttgctccctgagggcagaaggccattattagcaactgagttggccaggagtgtgtgccatgccgggctgggtgtacggagctgtcaagccaggcacctggggattaatttagcatgggttttcatgcccccgggctaccagtgaccatacagccatcatctctacctttgagttgatgtgtataactgaataatagtgctgtgttttcaaaaggaaaggcttaaaaaacagtgcttctgtagtacaaggagggatgctctgctgaaaatctggaaattacagctaagcaaaaagatgaaaatacaaagtagctgttattctaccacccagagatcgatttgtttctttactaacagatacggcaagtgcctgttctgtgccaggcactgtctaggcactggagatagtgatgagcaaaaccatctcttctttctggagatgacactccagcagtgaaggcagataggaaacaaatacataaacacatctggtgaaaaatgcttgaggaacagcaaagtagggtaagaaattagcgaaggaagtgggtgctgtttcaggtttgaggcttgtcaagaaagcctctctgaagaagagagattgagcagagacccatattattgagtgagggaggcctggggctctccagctagctgccagcaggatcagtctgtacaacagcccagggcacattcttcctgggtgcatttaagaaccactgttgggcccttttaattctaatacagaaggtggcctattaaaacca

SEQ ID NO: 7470 - DNA, 762 bp, Homo Sapiens
  XM_937277
atggatccagataaacaagtggacttgattgacagctccctgattcagcaggtcctactgcgtccaagtttctgggaagctcgcaagcactccctttctgtgcagcaactttctcaggcactccaagagctgtttcagaaggccagggaggaaaacccaggacaagtgcatcccagagctccggaactcactctgagccttctcacgacaatgtacaacagccacaaagagactgttacttcaaagcaagtactcttcaaagatacattgcaagtattcaatttaaagattgttcctcctacatgtctagctctttttcaactctatgcagaaaatagcaggggaggctatgattctgggccacgcatgactcgaagggttttgagaaaactactaacagatctacagcagatcccaactttcgtgggagagagtcgtgctctgtgccctgtggaaagtgccacccgcagctgtttccaaggggtgttgagcccagcaatcaaagaagaaaaattcctgtcttgggtccaatctgagcctcccatcctcctgtggctcccgacctgccaccggttatcagctgctgaaagggtcactcaccctgctcggtgcactctctgcaggactttcccaatcacgggactcaggtacagtcatcagcagcatttcttggattatcattctccatatggttctacagttggagctgcatcccttcagattctttttggggtcctccttacacatctgaaattcagttga

SEQ ID NO: 7471 - DNA, 986 bp, Homo Sapiens
  XM_937285
ttgggaggtgcttgtgtgcctggtgcgggagctatggggcccagggattgtgtttgaagtagtgcttctaccaacatgtcccatggttccagcgctggttttgaccgccacattaccattttttcacccgagggtcggctctaccaagtagaatatgcttttaaggctattaaccagggtggccttacatcagtagctgtcagaggttaagactgtgtagtaattgtcccacagaagaaagtacctgacaaattattggattccagcacagtgactcccttattcaagataactgaaaacattggttgtgttatgaccggaatgacagctgacagcagatcccaggtacagagggcacgctatgaggcagctaactggaaatacaagtatggctatgaaattcctgtggacatgctgtgtaaaagaattgccgatatttctcaggtctacacacggaatgctgaaatgaggcctcttggttgttgtatgattttaattggtatagatgaagagcaaggccctcaggtatgtaagtgtgatcctgcaggttactattgtgggtgtaaagccactgcagtgggagttaaacaaactgagtcaaccagcttcctagaaaaaaaagtgaagaagaaatttgactggacatttgaacagactttggaaactgcaattacatgcctgtctactgttctatcaattgatttcaaaccttcagaaatagaagttggagtagtgacagttgaaaatcctaaattcaggattcttacagaagcagagattgatgctcatcttgttgctctagcagagagagactaaacattgttgttagtttaccagatccgtgatgccacttacctgtgtgtttggtaacaacaaacaaatatcatggaggtccctggattgaaaaaagagcctctcccactcctcctaccaccgaagtggttaggactctatataaataaaaacaaggcttttggaaaaaaaaa

SEQ ID NO: 7472 - DNA, 4487 bp, Homo Sapiens
  XM_937367
atgaagatccctgcatgtgttagcaatgatgatcgtgataatgatgatgatgatgacaatgatgacgaggatgccagagacttggaagatgcagaactggatgactactcattctcatgctatagccagttggaagtgaatggatcgcagcactcactgacctgtgcttttgaggacccagatgtcaacaccaccaatctggaatttgaaatatgtggggccctcgtggaggtaaagtgcctgaatttcaggaaactacaagagatatatttcatcgagacaaagaaattcttactgattggaaagagcaatatatgtgtgaaggttggagaaaagagtctaacctgcaaaaaaatagacctaaccactatagttaaacctgaggctccttttgacctgagtgtcatctatcgggaaggagccaatgactttgtggtgacatttaatacatcacacttgcaaaagaagtatgtaaaagttttaatgcacgatgtagcttaccgccaggaaaaggatgaaaacaaatggacgcatgtgaatttatccagcacaaagctgacactcctgcagagaaagctccaaccggcagcaatgtatgagattaaagttcggatccattccctgatcactattttaaaggcttctggagtgaatggagtccaagttattacttcagaactccagagatcaataatagctcaggggagatggatcctatcttactaaccatcagcattttgagttttttctctgtcgctctgttggtcatcttggcctgtgtgttatggaaaaaaaggattaagcctatcgtatggcccagtctccccgatcataagaagactctggaacatctttgtaagaaaccaagaaaaaatttaaatgtgagtttcaatcctgaaagtttcctggactgccagattcatagggtggatgacattcaagctagagatgaagtggaaggttttctgcaagatacgtttcctcagcaactagaagaatctgagaagcagaggcttggaggggatgtgcagagccccaactgcccatctgaggatgtagtcatcactccagaaagctttggaagagattcatccctcacatgcctggctgggaatgtcagtgcatgtgacgcccctattctctcctcttccaggtccctagactgcagggagagtggcaagaatgggcctcatgtgtaccaggacctcctgcttagccttgggactacaaacagcacgctgccccctccattttctctccaatctggaatcctgacattgaacccagttgctcagggtcagcccattcttacttccctgggatcaaatcaagaagaagcatatgtcaccatgtccagcttctaccaaaaccagtgaagtgtaagaaacccagactgaacttaccgtgagcgacaaagatgatttaaaagggaagtctagagttcctagtctccctcacagcacagagaagacaaaattagcaaaaccccactacacagtctgcaagattctgaaacattgctttgaccactcttcctgagttcagtggcactcaacatgagtcaagagcatcctgcttctaccatgtggatttggtcacaaggtttaaggtgacccaatgattcagctatttaaaaaaaaaagaggaaagaatgaaagagtaaaggaaatgattgaggagtgaggaaggcaggaagagagcatgagaggaaagaaagaaaggaaaataaaaaatgatagttgccattattaggatttaatatatatccagtgctttgcaagtgctctgcgcaccttgtctcactccatcctgacaataatcctgggaggtgtgtgcaattactacgactactctcttttttatagatcattaaattcagaactaaggagttaagtaacttgtccaagttgttcacacagtgaagggaggggccaagatatgatggctgggagtctaattgcagttccctgagccatgtgcctttctcttcactgaggactgccccattcttgagtgccaaacgtcactagtaacagggtgtgcctagataatttatgatccaaactgagtcagtttggaaagtgaaagggaaacttacatataatccctccgggacaatgagcaaaaactaggactgtccccagacaaatgtgaacatacatatcatcacttaaattaaaatggctatgagaaagaaagagggggagaaacagtcttgcgggtgtgaagtcccatgaccagccatgtcaaaagaaggtaaagaagtcaagaaaaagccatgaagcccatttggtttcatttttctgaaaataggctcaagagggaataaattagaaactcacaatttctcttgtttgttaccaagacagtgattctcttgctgctaccacccaactgcatccgtccatgatctcagaggaaactgtcgctgaccctggacatgggtacgtttgacgagtgagaggaggcatgacccctcccatgtgtatagacactaccccaacctaaattcatccctaaattgtcccaagttctccagcaatagaggctgccacaaacttcagggagaaagagttacaagtacatgcaatgagtgaactgactgtggctacaatcttgaagatatacggaagagacgtattattaatgcttgacatatatcatcttgcctttcttggtctagactgacttctaatgactaactcaaagtcaaggcaactgagtaatgtcagctcagcaaagtgcagcaaacccatctcccacaggcctccaaaccctggctgttcacagaaccacaaagggcagatgctgcacagaaaactagagaaggggtcataggttcatggttttgtttgagatttgttgctactgtttttctgttttgaattttcttctttgttctgtttttactttatttagggggactaggtgtttctgatattttagttttcttgtttgttttgttttgtgttgtctgtgaatggggttttaactgtggatgaatggaccttatctgttggcttaaaggactggtaaaatcagaccatcttattcttcaggtgaatgttttactttccaaagtgctctcctctgcaccagcagtaataaatacaatgccataatcccttaggtttgcctagtgcttttgcaattttcaaagcacttccataagcattccttccacctccttgataggcatttatggaaagcctgctacatgtcaatcatactgttaggcacaggggacctaaagacacataaaaggatggcattctgcctcataaattgcaaaacctaatgaaagtgactgcttggtaaacaaattattattatattataaaatgctataaaagagccatattgaaagtgccctgttggagacagggcaaatgccacaaaaatgatgtaaatttacatggaggaaaagtagaatctgcctggtttgtaggcagcagaagacatttttcatcagtgggcaggtgttctttaccttttgtagaaatgggagtcaagtctcaaataggaggctccacaaaatctcatgccaggtctctgataccttattcacagaagttctttgaagtatttattgttattttctttgacttatgggaaaactgggacacaggaagacaggtaaattacccaacctcacacgttaagtcagaactgggagccataattttgtatccctggtataaatagacaatctctcgaagaaatgaagagatgaccatagaaaaacatcgagatatctccagctctaaaatcctttgtttcaatgttgtttggcatatgttatctttggaatttagtgtctgagcctctgtctgttactgtagtatttaaaatgcatgtattataatcatataatcataactgctgttaattcttgattatatacctagggacaatgtgtaatgtaagattactaattggttctgcccaatctcctttcagattttattaggaaaaaaaaataaacctcctgatcggagacaatgtattaatcagaagtgtaaactgccagttctatatagcatgaaatgaaaagacagctaatttggtccaacaaacatgactgggtctagggcacccaggctgattcagctgatttcctaccagcctttgcctcttccttcaatgtggtttccatgggaatttgcttcagaaaagccaagtatgggctgttcagaggtgcacacctgcattttcttagctcttctagaggggctaagagacttggtacgggccaggaagaatatgtggcagagctcctggaaatgatgcagattaggtggcatttttgtcagctctgtggtttattgttgggactattctttaaaatatccattgttcactacagtgaagatctctgatttaaccgtgtgctatccacatgcattacaaacatttcgcagagctgcttagtatataagcgtacaatgtatgtaataaccatctcatatttaattaaatggtataga

SEQ ID NO: 7473 - DNA, 3265 bp, Homo Sapiens
  XM_937394
atgaccctcaaggatgtgaggattgacctcctcgccaaccagactccgcagcccgcgaccccagcccctagccctctcctgctgttcccggtgtaccccgggggccgcccacctcagaatttaccccttcggcgccgcctgtcatcgacgccatcagggggcgtggcaaagggacgcgcggggcagagacctcctttggattggtggatggtcaagccccttctctttagcccctcctacaggcgttccgcccccttcgattggtctcgcaagttgattggtcaatcccctggtgctagtcctagtcttggttcggaccggccccaaggagcaggggcgaactctatcgctgcggttgcgagcgctgtagggagcctgtgctgtgccgcgcagttaggcagcagcagccgcggagcagtagccgccgtgggagggagccatgaagcattacgaggtaagaagcgagaaacaggggccgtgtggccactgctgacccattctttttccttctttgcgggaccacgggaccccactttctggtcctgtgccccgaaggaagagccagacggcgcaggcgcagtgggcaagcgttgcgccccgggccactcgtaaattccaatgcgcatgtgcgcaggaagtatttataaatctgcaacccaggctgttttgggggtactttttcttgggggtctctgcaggggctgggacgcttgcaggttccttgcagctcccccagcgggctgagttgcagactttgtcatgggagccacgaaggtgcgggacccttgctcccaatccgagggagtcttgcacaaatcttgcgccacgccgccgtcaccagcgtaggaaggggctttgctatcagtattcttgtgtacgacctttggaccccttccctcgcccgggacgttcccgggagacttaggcggtgagggaggtgcagctccacggctggctttcgcagagcagcgaagctgatcttgctttctggttatcaaagaggtcatctacgtcaacccttgggtgtcaccaaggagaaatcttatacccacccacagccactcttgaagcccaagtcttctgactcctaacttgggtctctttttcccttaaaacgaagtcttctgatgtgcttatcgccctaggtgataatataatattaataattcaaccaattatccctgaattattgctgacttttaagtaactatcatcaaataataaaatttgttattaaaattcaaaataacaatttagcaagtgcttactcttgtgctggtgagattctgttaccttgtataagaactattattattcctgtttgtaaggatgaataaagtctcagagatataaagtgacttgttcaaaggcccctagttagtaaatgcaaaacagataggggaactcaggacgccaaggtcttagttcctagccactatgccatgctggtcctcaaatgaaaaatagcaggtcgagcgatttcttgtttctcacttcccctccaatttaaaaaattctggcaaaatacacataaaatttaccatcttgactatttttaagtgtgcagttcagtggcattaagaacattcacattgttgtgcaaccatcaccaccacccatctccagaactctttgcatcttggaaaacagaagctgtagacgttaaatactaactccccattcctctccacctccacctctggcagccaccattctactcagccaccattccgtcttaatgaattgactactctaggtaccttggatacgtagaaggattttttttttcttttggagacagagtttcggtcttattgcccgggctggagtgcaatggcgcgatctcggcctactgcaaactccgcctcctgggtttaagcgattctcctgcctcagcctcctgaatagctgggattacaggtgaccgccaccatgcccggctaattttttgtatttttagtagagatgggggtttcaccatgttgaccaggctggcctcaaactcttgacctcaagtgatttgccctcctcggcctcccaaagtactgggattacaggtgtgagctagcgcgcccggctgtttgtttttattgacaagttgaatattactacctctgcctcctgccccctttattgctactatttttggaaatttacccacaatcctttgaagcctttttttgagacggagtttcgctcttgttgagtacgctggagtgcaatggcgtgatcttggctcaccgcaacctccacctcccgggttcaagtgattctcctgccccagcctcctgagtagccggaattacagtcatgagccaccatgcccggctaattttgtatttttagtagagacagggtttctccatgttggtcaggctggtctcgaactcccgacctcaggtgatccacccaccttggcctcccagagtgctgggattacaggcatgagccacggtgcctagccccttagaagcctttaacccacaaatcctgtaatttttgacatggtatcaagaatgaggaggtttgtattcaataatctctgtcatttaagttttcattctagaatgaagttctgatgtggattcccctctcaaactctatatctaaacctgtagtcccactactgtagtctcagctactcgggaggctgaagcaggaggatggcttgagcccaggaggttgaggctgcagtgagcccaaaaatcaggccactgcactccagcctgggcaacagagaccctgtttgaagaaaaaaaaaaaaaaaaaaaaaagctaccatgtccagcttgaaacatgcagtttggaacatccatatggcattttgcaaatgtagttggtttagttttgctagttaacagtcagataaagtaggcctctgagcaccctgggggtgcgtgcttttgttccaggaagctgggcacagcctgaggcccaagacttggactggagaatatgctccaccgtacttaatccttttctctcccagaaagaagggggagctttggccaggcatggtggctcacgcctgtaatcccagcactttggtaggctgaggtggccggatcgcttgaggtgaggagttcgagaccagcctggctaacatggagaaaccttgtctctactaaaaatacaaaagtgagccgagtgttgtggcacacgcctgtaatctcagctacttggaggcagaggttgcagtgagctgagatcatgccactgtactccagcctggatgacagagcgagagtctgtctcaaaaaaaaaa

SEQ ID NO: 7474 - DNA, 135 bp, Homo Sapiens
  XM_937448
atgacacgagataatgaacttctggccaagccaacgcatggtgacatcatcaggtttgcgcctccactggtgatcaaggaggatgagattcgagagtccattgaaatcattaacaagaccatcttgtctttctga

SEQ ID NO: 7475 - DNA, 1754 bp, Homo Sapiens
  XM_937514
cagtgctgtaagaaaggacggaggctgttatctatggcagatctatccaataaaggagagaaaggaccgcatacgcctggttctcatcatatgcaataaagagtttgaccatctgcctccaagaaatggggctgactttgccatcatggagatgaagaagctgcttgaggatctgggttacagtgtggatgtagaagagaatctgacagccaggaatatgaagtcattgctgtgggcatttgctgcctgaccagagcacaagtcctccgacagcacgttcttggtgctcatgtctcatggcatcctggggggaatgtgtggaactgaacatgatgaggcaaacccagatgggctgctttccttcaggccaaagctgaaggaacacttgaagccaggattttgagaccaattgattcatagctcttgggagctatttttcaaatgaaagagaaaacagaaataatttttctaaaaactggtaactacaagatgatttcattatcactaggcacactgttgaatgacacttgagagaaaacaaagtggtatgtatgtgtgtgtgtgtgtgtttgtgtgtgtgtgtctgtgtgtttgtatgtgtatgggtctatgtgtatgaaactagttagaaagaacattaaaaaagaacaaggggattctgatagccatactgtaggaggcacagtagtgtgtagaaaattgttgtctctgcagcaaaccatggggaacagtgggtcagagactgtccagcatctttgggagtcatgtcttcacagtcacctaagaacctggaggatgcagtttgcaagacataccagagaaggacttcattgttttctgctcttcaacctcatgtatacgtcttttggtggtattaagtgatttgtgggcctgaggctacctttgaatgattctaccaaatcaagaatccctaagaaacaatgatccgagggaatgttgtgtgctctcccatattttacatgatcttagatgtgatgtgaaaacagattccttccccctcccacacccacgtttttaaaaattgtacttttcttataagtgttacaatttaaagccaaaggcataccaaatattaaagcaacacaacataaggaatcccattcaccacacaccatttaaacacaaatgatggattctgttatttatcaaacccatttaatgttttgtgtagtgttttcatggattccaggaatggcttccctttctcaaatgatcaatttcaagtcttattctccatatttcccatctgattccactatgagcagtgccattgcatgccctactagaactgtggataccctttaaaacaagtagaagatgatagggtgggactcattacgtctaatcttggggaacactgataacgtgtccaggagagacagcacaaggggctccatcttcatcacacaactcatcgcatgcttccagagatattcctggcgctgccacctagaggaagtattttggaaggttcagcaagcatttgaaagtccggaggcaacagtccaaatgcccaccatagaacgagtgtccatgacaagatatttctacctctttcctggcaattgaaaatggttaagcattgagagttgttggtggtgtatgaaataaatgaaagtgtgatattggaggaaaccacaagcagcccagccctcctttatcaacttcaagaaacacctttactagtacagattgaatgcttaacattttgtatttcaataaaggtgaagaca

SEQ ID NO: 7476 - DNA, 552 bp, Homo Sapiens
  XM_937544
atgactgtacccaatgacccttacacttttctctcttgtggtgaagatagaactggtaggtggtttgatacacgcatcaaaacgagctgcacaaaagaagattgtgaagatgatattttaattagctgtcgacgtgctgccacatctgttgctatttgcccaccaataccatattaccttgccgttggttgttcttatagctcagtacaaatatatgataggcgaatgctgggcacaagagctacagggaattatgcaggtcgagggactactggaatggttgcccattttattgcttcccatcttaataataagtcctgcagagtgacatttctgtgttacagtgaagatggtcaagagattctcattagttactcttcagattacatatatctttttgacccgaaagatgatacagcacgagaacttaaaactccttctgcggaagagagaagagaagagttacgacaaccaccagttaagcgtttgagccttcgtggtgattggtcagatactggacccagatcaaggcctgagagtgaacgagaatga

SEQ ID NO: 7477 - DNA, 3515 bp, Homo Sapiens
  XM_937612
aacccggaagcggatcgcatggagtgatggtcccaccgcagcggattgacttctaaagactcttggtacgtgaggaagaaacccggaagaggaagaggaaagcaaaggagtcagggatggctctttctcagggtctattgacattcagggatgtggccatagaattctctcaggaagagtggaagtgcctggaccctgctcagaggactctatacagggacgtgatgctggagaattataggaacctggtctccctggatatctcttccaaatgcatgatgaaggagttctcatcaacagcacaaggcaatacagaagtgatccacacagggacattgcaaagacatgaacgtcatcacattggagatttttgcttccaggaaatggagaaagatattcatgattttgagtttcagtggaaagaagatgaaagaaatagccatgaagcacccatgacagaaatcaaacagttgacgggtagtacaaaccgacatgatcaaaggcatgctggaaacaagcctattaaagatcagcttggatcaagctttcattcgcatctgcctgaactccacatgtttcagacccaagggaaaattggtaatcaagttgagaagtctatcaacagtgcttcgttggtttcaacatcccaaagaatttcttgtaggcctaaaacccacatttctaagaactatgggaataatttcctgaattcttcattactcacacaaaagcaggaagtacacatgagagaaaaatctttccaatgtaatgagagtggcaaagcctttaattatagctcagtcttaaggaaacatcagataatccatttaggagcgaaacaatataaatgtgatgtgtgtggcaaggtctttaatcaaaagcgatatcttgcatgtcatcgtagatgtcacactggcaagaaaccttacaagtgtaatgattgtggcaagaccttcagtcaggagttaacccttacatgccatcatagacttcatactggagagaaacattacaagtgcagtgagtgtggcaagaccttcagtcgaaattcagcccttgtaattcataaggcaattcatactggagagaaatcttacaagtgtaatgaatgtggcaagaccttcagtcaaacgtcataccttgtgtaccatcgtagacttcatactggagagaaaccttacaaatgtgaagaatgtgacaaagctttcagtttcaaatcaaaccttgaaagacataggaaaattcatactggagagaaaccttacaagtgtaatgaatgcagcaggacctttagtcggaagtcatcccttacacgccatcgtagacttcatactggagagaaaccttataagtgtaatgattgtggcaagaccttcagtcagatgtcatcccttgtataccatcgtagacttcatactggagagaaaccttacaaatgtgaagaatgtgatgaagctttcagtttcaaatcgaaccttgaaagacataggagaattcatactggagagaaaccttacaagtgtaatgattgtggcaagaccttcagtcagacatcatcccttgtataccatcgtagacttcatactggagagaaaccttacaaatgtgaagaatgtgatgaagctttcagtttcaaatcaaaccttgaaagacataggataattcatactggagagaaactttacaagtgtaatgaatgtggcaagacctttagtcggaagtcatcccttacacgccattgtagacttcatactggagagaaaccttaccagtgtaatgagtgtggcaaagcctttcgtgggcagtcagcacttatttaccatcaagcaatccatggtatagggaaactttacaaatgtaatgattgtcaccaagtctttagtaatgctacaaccattgcaaatcattggagaatccataatgaagagagatcgtacaagtgtaatagatgtggcaaatttttcagacatcgttcataccttgcagttcattggcgaactcatagtggagagaaaccttacaaatgtgaagaatgtgatgaagctttcagtttcaaatcaaaccttcaaagacataggagaattcatactggagagaaaccttacaggtgtaatgaatgtggcaagacctttagtcggaagtcataccttacatgccatcgtagacttcatactggagagaaaccttacaagtgtaatgagtgtggcaagaccttcggtcgaaattcagcccttataattcacaaggcaattcatactggagagaaaccttacaagtgtaatgagtgtggcaaggccttcagtcagaagtcatcccttacatgccatcttagacttcatactggagagaaaccttacaaatgtgaagaatgtgacaaagttttcagtcgcaaatcaagccttgaaaaacacaggagaattcatactggagagaaaccatacaaatgtaaggtttgtgacaaagcttttgggcgtgattcacacctggcacaacatactagaattcacactggagagaaaccttacaagtgtaatgaatgtggcaagaacttccgtcacaattcagcccttgtaattcataaggcaattcatagtggagagaaaccttacaagtgtaatgagtgtggcaagaccttccgtcacaattcagcccttgaaattcataaggcaattcatactggagaaaaaccttacaagtgtagtgaatgtggcaaggtttttaatagaaaagcaaacctttcacgtcatcatagacttcatactggagagaaaccttacaagtgtaataaatgtggtaaggtttttaatcaacaagcacaccttgcatgtcatcatagaattcatactggagagaaaccttacaagtgtaatgagtgtggcaaaaccttccgtcacaattcagtccttgtaattcataagacaattcatactggagagaaaccttacaagtgtaatgaatgtggcaaggtttttaatcgaaaagcaaaacttgcacgtcatcatagaattcatactggaaagaaacattagaaatatgaagaatgtgacaaaaatcttgggcgtgattcacacctggcccaacaaactagaagtcacactggagagaaaccttacaagtgtactgagtgtggcaaagcctttatcttcagtaacactacaaccgtttcaaatcattggagaatccataatgagagattttgaaagtgtaataaatgtggcaaatttttcagacattgttcataccttgcagttcatcggagacttcatacaggagacaaacttcacaagtatgatgattgcagcaaagcctttacttcacgttcacacctaattagacatcagagaatccatactggacagaaatcttacaaatgtcatcagtgtggcaaggtcttcagccgggcgtggtggctcacgcctgtaatcccagcactttgggaggctaaggtgggcggatcacgaggtcaggagatcgagaccatcctggctaacacggtgaaaccccgtctctactaa

SEQ ID NO: 7478 - DNA, 501 bp, Homo Sapiens
  XM_937648
atgggccgagtggctctgagggtcctgttccccgaccgctacgtcctacagggcttcttccgccccagcgagacagtgggggacttgcgagacttcgtgaggagccacctggggaaccccgagctgtcattttacctgttcatcacccctccaaaaacagtcctggacgaccacacgcagaccctctttcaggcgaacctcttcccggccgctctggtgcacttgggagccgaggagccggcaggtgtctacctggagcctggcctgctggagcatgccatctccccatctgcggccgacgtgctggtggccaggtacatgtccagggccgccgggtccccttccccattgccagcccctgaccctgcacctaagtctgagccagctgctgaggagggggcgctggtcccccctgagcccatcccagggacggcccagcccgtgaagaggagcctgggcaaggtgcccaagtggctgaagctgccggccagcaagaggtga

SEQ ID NO: 7479 - DNA, 750 bp, Homo Sapiens
  XM_937754
atggatattaagagcaatattaccaaggaggtgtacaccccggcgatattgagagtaatatcatgctctccccttcgggatattaggaacaatgtcgcaggaggtgtgtacaacccctatcatcctctccccctgaatataagaaacaacatcacaggaggatgtacaccgcctgcgatattgggagtaatatcattttctacccctcgggatattcggaacaatatcacagtgggtgtgtacagcccctgcgatattgccactagtatcatcctctccctcccaggatataaggaacaatgtcacaagggggtgcacaccccctatgatattgggggtggtgtaaacctacctgtgatattgttcccaatatccagggatggagagcatgttactagttttaatatcgcagtaggtgtccactcaccctgtgacactgatcctaatatccagggggtagagtatgacatgactcccaacatagcaatgaatgtacagccacccgctaaaggaagggaagataatattattctttgccctgcaggggatgtacacccacctgtgatattgttcctaatatccagggtgggagagcatgatattgctctcagtatctccgtgggtgtacacccactttgtgatattgctcttaatatccaggggatagagtatgacctgactcccaatataacagtgggtgtacatctgcccggggatattgctcctagtattcagaggaggcgaaaatga

SEQ ID NO: 7480 - DNA, 1150 bp, Homo Sapiens
  XM_937794
ttgtgagggttggaggtcacgaaggaaagacctggctcgcgcctgcacacagtaggtgctcacatcaatgacatcattcccactcctgacgtcctcatgtcaaggtctgggaagatacctggaggttttgattggggtctcggtggccttcgtcctgctgctcttcctcctcctcttcctcctcctccgacgtcagcgtcacagcaaacacaggacatctgaccagagaaagactgatttccagcgtcctgcaggggctgcggagacagagcccaaggacaggggcctgctgaggaggtccagcccagctgctgacgtccaggaagaaaacctctgtaagaggaagagaggggacaaatgggggtgctggagagacaggagtcccaaaatttcagtagcaacagggaggggctgggaagggtctggggctccgtggaagatggtcttgccccacactgtgggacctccctgcattcggtggccccatctgggagcagggcagggggccagcaggactgagaggtctcagagaaccaggagacgaaccccttgctctgccccagcagatgctgctgtgaaggacacacagtctgaggacagggtggagctggacagtcaggtgagatcccgccccgtcccaggcaccaaaggcctcctggtgccagatctaatcctgcaggacttctctgtcctccttcccccggctctcagcatcgtcacggtggacccctccttgtccagcatgctgcctcccgcctgctgtgacctcactctcttctgctgtcctgggacctcgtgggcctcctcccgggtccccttcctgctcctcatcctctgtttggcccagagcccacacgatgaagacccccaggcagtgacgtatgccccggtgaaacactccagtcctaggagagaaatggcctctcctccctcctcactgtctggggaattcctggacacaaaggacagacaggtggaagaggacaggcagatggacactgaggctgctgcatctgaagcctcccaggatgtgacctacgcccagctgcacagcttgacccttagacggaaggcaactgagcctcctccatcccaggaaggggaacctccagctgagcccagcatctacgccactctggccatccactag

SEQ ID NO: 7481 - DNA, 487 bp, Homo Sapiens
  XM_937850
atggctctggctgattcctttttccgattttgcacagaagttcctcatgctctgacactatttgggactgggaaaagctcacttaagtgctgggattacaggctccaaacaggcatgcgaggtgcctttggaatgccccagggcactgtggccagggttcacattggccaagttatcatgtccatccgcaccaagctgcagaacaaggagcatgtgattgaggccctgcgcagggccaagttcaagcttcctggccaccagaagatccacatctcaaagaagtggggcttcaccaagttcaatgctgatgaatttgaagacatggtggctgagaagtggctcatcccagatggctgtggggtcaagtacatccccaatcgtggccctctggacaagtggcgggccctgcactcatgagggcttccaatgtgctgcccccctcttaatactcaccaataaattctacttcctgtcaaaaaaatgtcac

SEQ ID NO: 7482 - DNA, 2640 bp, Homo Sapiens
  XM_937912
ctagttatggtgccatatgctcatgctttaagctagaagtttctaattgcaataataatgatgatgataactaatacttactaccactttatagtttacagggggctttcatatatatgtatatatttttttcaatttcatcttaacagcattcccagtgaattaaggagggtttatcagccccgaatacatggtaaggaattatggcctgagcaacacaagcagatagggaagaaaccatatctccatttaagtacatcagctactacattttccgtttttcatatttgtagacttttaaccctcatttggttcaaatattgaaaatataaatggtatttcacaacggggaaaaaaaaaaccccaaaacctaggactaggaatctctgttaaaattcacttctttgcagtgtataaatctaattacaggcaggaaaattctggtttatagttagattttcacacacgatccacagtgcccaatctaactcgatctcttttcttaagtttgaaatagttgctatataacttcagcaaagtctcccaggatgttggataaggctcattcgtttctttttcctgtgttctattcagcatctgactgctgtttcagctcatgggagacctaccaaaggcaattagattccagatctggctataataatttcagtgcaagtttgaaaccccagttggaatgtgaattcatgactctggagcactctagtggcctcatggggtacaatacaagagcaatgctgctttcccaaaaaacctactccacattttgggatcagattttggaaaacaagacggtctcttattgctacattcctgatgtggctccaggagtgagcttgcatcatcactctcagatgatacgcaccaagtgtgttatggttattgtttgggtgtaaaaactagcccagtggatttgttctgaagtgttcgggtagttttgtgtgctcaattaaaagctggaaaagaaatgactaatttgttttggagccacaaagcctttcttttcttacatttccattaggttgcgggttgtcgggaggaactagcttgctatctttgtactcaacttttgtgcttgtttccctctctgaacttttttcatctcatgtccctcaccaccaagcttttgtctgctttgccaatgtcgttggactcagatctactgttttgttccagaaaactacttctcggatacagtcccatctgccttccctaattcttctgtcttaggggaagggtctccctgagggctgatcctgaaggctgtcctcagtctaaaccaccaaacaagaccatacgttctggggttaacccttgggtcagaacattagtctggacccttatcctctttcaaactctaggaaggtcacattacataccttttgcaaatgtgcatcatctgcagggcccatcattgcattttgatgtaatagtaggtttagaggagacctctggttaattggcattaccttcttttggggaacttatgagaacctccgacgtagtctttttttttttttttttttttttttgcctcttccacttggtctgcagtctgattcactcctttactttcctccaatatactgacccttgggacttgggtattgctggcctgctttgggccctcaggctctttgcctgctggtttctgagctttccatagtcacagtctggttttaggcagaaactgtacctccatttgcaatcaacccttttgcagctgtgccttacgcttcttactgtgtttttaccaattcatctggaacaaactagaaaaggaacaactattaagtagaaatgaaaccatttgaaggctcaccaaacaaacaaaaacagtgctagtcacaggagtactgtttcccagcctatgactctggagctgactggtggtttgttgttgttgttgcccctggccagatctctgatggtagcctatgtagcaaaattattttagggctagatggctcctttaaagctaatacagtccaacctccatctctgaatgaagaaacagaggcccatggttggttggactgctgttagtaaatttaaaagtcagtagtagaattctggtctctctgtgactgttacttccattaccccatggtctctgtgtaaaaagcaagtcatctttcccaaccgacttggcctttttctggtatccatgccttttcattgacctccttggttcttctttccgcagtcagttctaatgtaagatatgatacacctttccatctttggaaccccactatatacccttatttctacatgttctgtactttcctgggaaggggaagtagaaaagggaagaggttaatgttctttctggaatgtccatccacaatgtggtgattctattggagaggtaaacaagactcctgtaatcagaagggacagctgatggatctggataagaaattcgaaatctcgaagcttatgaatgtgcaatagatgttatttaatgctcattgtaaattcagattttgggcttctttatacttaaaggaggctttgaattttaaggctaaaatagaatcatgcatcttctttggagtgtttcttaccgaattattttttattttgctggaagcttttattgaagtttaaactaaaaaa

SEQ ID NO: 7483 - DNA, 429 bp, Homo Sapiens
  XM_937928
atggctcgtacaaggtggactgcccgcaaatctaccggtggtatagcacccaggaagcaactggctacaaaagccacttgtaagagtgcgccctctactggaggggtgaagaaacctcatcgttacagacctggtactgtggcactccgtgaaattagacattatcagaagtccactgaacttctgattcgcaaacttcccttccagcgtctggtgcgagaaatcgctcaggactttaaaacagatctgcgcttccagagggcagctatcggtactttgcaggaggcaagtgaggcctatctagttggcctttttgaagacaccaacctgtgtgctatccatgccacacgtgtaacaattatgccaaaagacatccagctagcacgccacatacgtggagaacgtgtttcagaatacaccatgatgtga

SEQ ID NO: 7484 - DNA, 255 bp, Homo Sapiens
  XM_938063
atgccaaacttgcaggagttggacatctccaggcatttcacagagtgtatcaaagctcaggccacaacagtcaagtctttgagtcaatgtgtgttacgactaccaaggctcattagactgaacatgttaagttggctcttggatgcagatgatattgcattgcttaatgtcatgaaagaaagacatcctcaatctaagtacttaactattctccagaaatggatactgccgttctctccaatcattcagaaataa

SEQ ID NO: 7485 - DNA, 3547 bp, Homo Sapiens
  XM_938171
atggggaatttcctggaggtggaggagcccagcaaggttcggcccccacaggtctgcactggtgaaccctcatggtccctcagggagcccgggagaggtgaggaggacctggatagggcccaggcccagatgcctgcaggggagaaagctccacacaaggggtttgtgaggccttgccccagccccaacgagattcaggtgtgggggactctctcccctcccccaggcccatttctgggccatctgaagaggacatcccaagggcctggagtgcccacttgccagctccaagctgtgtggattctgctcgggtctggcaaggaggggccagacagagcccggcctgacgctgtcacctgtcctgccctgagctgtctgtgggcagagctcaagctctggcagcaacactccagtctgagtgcccagctgggccagctgccattcacaggcctgaccttcccccaagtccccatggctgggaaggcggctgccccctctgacaggagtggggatccaggagccccggaggtgcgtgcatctctggggtggtccggctcctcatggctggacactggctggagcagtccttggaccatccttggaagcttcagaaactcttccaggaaagcgttactcctgctgcaggccctgggcttccggcttctcaaagcccccctgggtggctccaaactgtacaagcctgactggggacccccggcctggctctgggatttcagcagggagaaggcagaactgccatgtggcacgctgagcactgcccagccgcctcatcccaggagccctcctcccggggtctgtgcccaaaaccacaggctcttctaccgggcgcccactgggtgctgtgggacgtgctgcttggtacaatgtcgtcagattctccgcacagcctccacagaaatcgcagtgcctctccagagactgagcctgatagagtctggggatgtgtctgtgactctgggctgggtcagcggaagagcagggacccaggccgaggtgccaggacggccccaaagggccaccagggaaggcactgcagggccaaaggccaagagctatgaagtgggcagggctgtggtccaggcccaaggccagggtggcctgtccctggtcaacagagcgcagatgctccacaactgggatgacccatatctgtttgccaagctgaggaacaggctgggctgtgcccaatggcaggggaggggcacgacaagacctaccgtgctctccagcatctctgcccacctctgctgcgtgtccagcgcagaagagggcagccccactggaccctcagccctggggctggcgggtggccactcacgtcctggaaccctgagctgctctcaggccggtgactttggaccaatgttggcaatctgtgggtttgcaccaaaccacacagcctttgagtgcggctgtcgcagcaatcaaggtgggctccctggtggaggtggacagcagctgctggagagcccggagggcagccaggaccgtgtcagacggcaggagtcgggcggggccactccaggcaccggccagcagggcagaggtaccagggagggccctcgggctgcgggcgtgaggtcagagcccagggtgaggaggaagcatctccagccaggtgcgctctcggcccccgccggggctgcgaggctgggggcgctgccgctgcgagggcttccagaggagccggcgctacctccccgcgcgcccggccacgtgcgcgacgggatgcgcagacagccggggacgcagactggcggccgcccggccgccgccgcctcgcgggccccgggcggaagggggcggggtcccgattcgccccgcccccgcggagggatacgcggcgccgcggcccaaaacccccgggcgaggcggccggggcgggtgaggcgctccgcctgctgcgcgtctacgcggtccccgcgggccttccgggcccactgcgccgcgcggaccgcctcgggctcggacggccggtgtccccggcgcgccgctcgcccggatcggccgcggcttcggcgcctggggctcggggctccggggaggccgtcgcccgcgatgctgctctccaagttcggctccctggcgcacctctgcgggcccggcggcgtggaccacctcccggtgaagatcctgcagccagggacctcgccgtctgttgagcggctctgcctctgtggtgggcgtgctaagccctgtgtccccttaggcacccgagtgtacagccccccggagtggatccgctaccaccgctaccacgggcgctcggccaccgtgtggtcgctgggcgtgcttctctacgatatggtgtgtggggacatccccttcgagcaggacgaggagatcctccgaggccgcctgctcttccggaggagggtctctccagagtgccagcagctgatccggtggtgcctgtccctgcggccctcagagcggccgtcgctggatcagattgcggcccatccctggatgctgggggctgacgggggcgccccggagagctgtgacctgcggctgtgcaccctcgaccctgatgacgtggccagcaccacgtccagcagcgagagcttgtgaggagctgcacctgactgggagctaggggaccacctgccttggccagacctgggacgcccccagaccctgactttttcctgcgtgggccgtctcctcctgcggaagcagtgacctctgacccctggtgaccttcgctttgagtgccttttgaacgctggtcccgcgggacttggttttctcaagctctgtctgtccaaagacgctccggtcgaggtcccgcctgccctgggtggatacttgaaccccagacgcccctctgtgctgctgtgtccggaggcggccttcccatctgcctgcccacccggagctctttccgccggcgcagggtcccaagcccacctcccgccctcagtcctgcggtgtgcgtctgggcacgtcctgcacacacaatgcaagtcctggcctccgcgcccgcccgcccacgcgagccgtacccgccgccaactctgttatttatggtgtgaccccctggaggtgccctcggcccaccggggctatttattgtttaatttatttgttgaggttatttcctctgagcagtctgcctctcccaagccccaggggacagtggggaggcaggggagggggtggctgtggtccagggaccccaggccctgattcctgtgcctggcgtctgtcctggccccgcctgtcagaagatgaacatgtatagtggctaacttaaggggagtgggtgaccctgacacttccaggcactgtgcccagggtttgggttttaaattattgactttgtacagtctgcttgtgggctctgaaagctggggtggggccagagcctgagcgtttaatttattcagtacctgtgtttgtgtgaatgcggtgtgtgcaggcatcgcagatgggggttctttcagttcaaaagtgagatgtctggagatcatatttttttatacaggtatttcaattaaaatgtttttgtacatagtggata

SEQ ID NO: 7486 - DNA, 918 bp, Homo Sapiens
  XM_938181
gaagattgaatctctcctcccgccgcccaagatgccgaaaggaaagaaggccaagggaaagaaggtggctccggcccctgctgtcgtgaagaagcaggaggctaagaaagtggtgaatcccctgcttgagaaaaggcctaagaattttggcattggacaggacatccagcccaaaagagacctcacccgctttgtgaaatggccccgctatatcaggttgcagcggcagagagccatcctctataagcggctgaaagtgcctcctgcgattaaccagttcacccaggccctggaccgccaaacagctactcagctgcttaagctggcccacaaatacagaccagagacaaagcaagagaagaagcagagactgctggcccgggaggagaagaaagctgctggcaaaggggacgtccccacgaaaagaccacctgtccttcgagcaggagttaataccgtcaccaccttggtggagaacaagaaagctcagctggtggtaattgcacatgacgtggatcccatcgagctggttgtcttcttggctgccctgtgtcgtaaaatgggggtcccttactgcattatcaaggggaaggcaagactgggacgtctagtccacaggaagacctgcaccactgtcgccttcacacaggtgaactcggaagacaaaggcactttggctaagctgatggaagctatcaggaccaattacaatgacagatacgatgagatccgccgtcactggggcggcaacgtcctgggtcctaagtctgtggctcgtatcgccaagctcgaaaaggcaaaggctaaagaccttgccactaaactgggttaaatgtacactgttgagttttctgtacataaaaataattaaaataatacaaattttcttcaaaaaaaatttataaaaattagccaggc

SEQ ID NO: 7487 - DNA, 1785 bp, Homo Sapiens
  XM_938244
ctggaggccagagatggtcagagatgccatgttcctaaccgggagccagggaatctctctgagatccctgagagttggctgtttttcctgttgatcaggtgtttgggggcatggccctggtgctgctgcggccagacagctccatctttgccaacattgttgctgtccccagtgcagtacaggagagggtgaccttctgtcccacggtccctgacaccgaggcttcctgggtcagcgcagactgtgcccaggaccctggaacagaggaggcaggcacagagaggtccatggaggtgaaccacccagcacccctcagcctcttggaacttgcagcccacagcctgctgagcaatgaggcttcagttccactggtgttggaacagctcacagtgaaccttttcccgccactactcactgctgcatttgccaaggggcacagaaaggctctgaaggccttggtgcaggcctggcccttccggtttctccatctgggctctctgatagtgcagtggcccaaccaagacagcctgcaagctgtggtggatgggctggaggccttttctgcccacagggcttgtcccaggaagtcagaactgaggatgctggatttcaccctggactctgagcaagtcttttactgtggtaaaggggcttctgaagccttggccaagttcccattttggttaccatcagcagtcaaggcagagacgccccaggccacggccaggcccaagccattagataagttcctctccgacctcctgacgaaagtggaacagagccacggggccctgcatctctgctgtaggaagttgcacattgagaagatggccgtcgacagtctgctgaggatcctgaagacactcaggctggatttcatccaggagctggaggtgttttactggtgtagagacttcttggtattggcagagccaaacctatctgccatacagctgggaaggatcttcaacctgcgcagcctcaagctcttctactacaagtgggccttctcctcatgggtcaggcggccctccagctacttcttctcccagctcaccatgctgggccacctccggaagctgcacctgtctcactcctacctcgtaggcaaactacattacatactcagctgtctgtgggtcccactacattccctggagatctgcaactgcaagcttctggacactgacatcacctacttgtcccggagccatcataccacctgcctgaagaagctggatctgagcgtcaacgacttgtcctacatgatccctgggcccttgggtaccctgctgagggcagtctcagggacactgcagcacctagacctgaaacactgctggctgaaggatgcccacctcagtgccctcctgcccgccctgtgccgctgctcccacctcagttccctgagcctctccgacaaccccatctccagtgcctgcctcctgagcctgctggagcacaccatggggctgatggagctgaagcaggtactctatcccatcccagttgactgctgcatctacctgcatggcgtctgccggggtcctgtgaacgaggacaagctgtgccagttgcaggccgagatacagaagcagctgcaagccatgcagcaggctgacatgcagtggagcccctccactgtctttgcttatgcagctggtgcagtttgaatgaagaacaggagccaggctcagggaacagaagtcagagagggcagctggaatcacagctgaggccacatgttgtttgcaaggaacataaaataaacttccatgggaacta

SEQ ID NO: 7488 - DNA, 3742 bp, Homo Sapiens
  XM_938283
atggcggctggccgggcccaggtcccttcctccgaacaagcctggcttgaggatgctcaggtcttcatccaaaagaccctgtgtccagctgtcaaggagcctaatgtccagttgactccattggtaattgattgtgtgaagactgtctggttgtcccagggaaggaaccaaggttctacactgcccctcagctatagctaagtaagtgtgagggacattgaatatgataaacgtctctgggagagtcataggctgggattacagggctttttcttccttcttagaaacaagctcagaggtgtgcagcgaaacctggctgggagtctagttcgattgagtgctctggtgaaaagtaaacagaaagcttacttcatcctgtctcttggtagatcacacccagctgtcacccacgtgtccatcatcgtgcaggtccctgcccagctggtgtggcacagagcccttcggcctggtacagcctatgtgctgacagaactgcgagtgtccaagatccgtggtcagcgccagcatgtttggatgaccagtcagtcctcccgtctgttgctgctgaaaccagaatgtgtgcaggagctggaactggagctggaaggacccctcttagaggctgaccccaagccactccccatgcccagcaactcggaggacaagaaggatccagaaagtcttgtccggtattctagactcctatcctattcgggagcagtcactggcgtgttgaatgagcccgctggcctctatgagctggatgggcagctggggctctgccttgcctaccagcagttccgtggccttaggcgggtgatgcgacctggagtgtgtctgcagctccaggatgttcacctgctccagtcagtgggaggggggacaagaaggccagtgctcgccccctgcctccgtggcgccgttctgcttcaaagcttctctcgtcagaagcctggggctcactcatcccgtcaagcctacggggcctccctgtacgagcagctggtgtgggaacgtcagttaggacttcccctctacctgtgggctaccaaggccctggaggagctggcctgcaagctgtgtccccatgtgctgagacaccaccagttcctgcaacattcctctcctgggagccccagcctgggactgcaactcctggctcctaccctggatcttctagctccgccaggcagccctgttcggaatgcacacaatgagatccttgaagagccacatcactgtcccctccagaaatacactcggctgcagactccctcctccttccccactctggccaccctgaaagaagaaggacagcgtaaggcctgggcctcctttgaccctaaggcccttctgcccctcccggaggcctcctacctgcccagctgccaactcaatcgccgcctggcttggtcctggctctgtctgctgccctctgccttctgcccagcccaggttttacttggggttctggtggcttcatctcataaaggttgtctgcaacttcgggaccaaagtggttccctgccctgcctgctcctggccaagcactctcaacccctcagtgacccacggctgataggctgcctggtgcgggcagagaggtttcagttgatcgtagagagggacgtgagaagcagcttcccttcctggaaggagctgagcatgccaggcttcatccagaagcagcaggccagagtctatgtccagttctttctggctgatgccctgatcctgcctgtgcccagaccctgccttcattcagcaacaccctcaacacctcagacagatcccaccggcccagagggaccccacctaggacagagccggctcttcttgctctgccacaaggaggccctcatgaagcgtaatttttgtgtccccccaggagcaagtccagaggtgcccaagcccgccctcagtttctatgtgttggggagctggcttgggggcacccagaggaaggagggtactggatgggggctgcccgagccccagggaaatgacgacaatgatcagaaggttcacctcattttctttggctcttcagtccgctggtttgagttcttgcacccgggacaggtgtaccgactcgtagctcctggccccgctacaccaatgttgtttgaaaaggatggttcatcctgcatatctcggcgtcctctggagttggctggctgtgcatcctgcctcactgtccaggacaactggactctggagcttgaaagctcccaggatatccaagatgtgctggatgcaaacaagtcattgcctgaatcctcactgaccgacctgctcagtgacaatttcacagattccttggtgtctttctccgctgagattttgtcacggacactatgtgaaccccttgtggcgtctctctggatgaaactggggaacacgggggccatgagaaggtgtgtgaagctaacagtcgctcttgagactgctgaatgtgaattcccccctcacctggatgtatatatagaagacccacacttgcctccctcactaggactacttccaggagcccgggtccacttcagccagttggagaaaagggtttccagatctcacaatgtttattgttgtttccggtcatccacttatgtgcaggtcctgagttttccccctgagaccaccatcagcgttcccctgccccacatctacctggctgaacttctgcagggtggtcagtccccattccaggccactgcctcttgccatatcgtctctgtcttcagccttcagctcttctgggtgtgtgcttattgtaccagcatctgccggcagggaaagtgcactcgcctgggctccacttgccctacgcagacagctataagccaggccatcatcaggctcctggtggaggatgggactgccgaagccgtggtgacctgtaggaatcaccatgtggcagcagcactagggctgtgtcctagagagtgggcctccctcctagatttcgtccaagtgccaggcagagtggtcttgcagtttgcagggcctggagcccaacttgagtcttcagccagggttgacgagcccatgaccatgttcctctggacactttgtactagcccctctgtcctccgtcctattgtgctttcttttgagctggaaaggaaaccgtcgaagatcgtcccattagaacctcctcggctacagcgattccagtgtggagagctccctttcctgactcacgtgaaccccaggctccgattgtcctgcctttctatccgagagtcagagtactccagctctctggggatccttgcttcctcctgttaactgaactgcaaggatggcctgagagtccttccttgctgaaaacctgaaggcctaggtcctggctcctctccctacttgttctgtgattgaaccaaggactccagattcacaaactgctactccactataatttcccttctttggtgttctggtgccagcctgccttggcaaaattgtggcaacaggaaatcatggccctattaatatgtcctctgattgggacaaggcacctgcattcacaggcggccctgagcacctgggttctgactttgtcgcaggagctgagggaacaaaagacttgctcgctgtggggtgatggtgacaggcctattgacctgcaatgaagccctctggtgtcatttctcactggtactcatctctggggtcccaggcctcctgactcctagttgtccacctcctaggaactcctagtcgttcatcatcatttcag

SEQ ID NO: 7489 - DNA, 5383 bp, Homo Sapiens
  XM_938301
atgcgtacagtttgtactgaaagaccggcgcgcacacgcttccgtgctacgaggcacttgagctgcagccagccttgcccgtcttggactccactgcggctgcgcgataaaagcaccggcggcgattggcccgggggcgccagagggcgggaggaagcgggaggaactccgtcgtcctccgcgcgcgcctgcccgcggctggggaaccaagggcctggaggggaaacagctccctgctgcgttgttttgggctccgtgagccgaaagggggaggggagacgaaggagaagcaaacactgcgcagcgggaccgtgcgcggcctccgctcctgcgtgcgtgcgctcgctcgcgcgggctcagtgctggcgcgtgaggcggaggcgggcggcggcggcggcgcctgcgcggtcggactcggtcgacggttcgcaggggaggaggcggcgggaggcggaggaggcggcggcggcgatggaggtgaagcggctgaaagtgaccgagctgcggtcggagctgcagcggcggggcctggactcgcgcggcctcaaggtggatctggcgcagcggctgcaggaggcgctggacgccgagatgctcgaggacgaggccggcggcggcggggccgggcccggcggggcctgcaaggcggagcctcggcctgtggccgcgtcgggcggcggcccgggcggggacgaggaggaggacgaagaggaggaggaggaggacgaggaggcgctgcttgaggacgaggacgaggagccaccccctgctcaagccttgggtcaggccgcgcagccgccgccggagcccccggaggcggcagccatggaggccgcggccgagccagatgcttccgagaagccggcggaggccacggccgggtcaggcggggtaaatggtggcgaagagcagggcctcggcaagagggaggaagacgaacccgaggagcggagcggggacgagacgccgggatccgaggtgccgggtgacaaggccgccgaggaacagggagatgaccaggatagtgaaaagtcaaaaccagcaggctcagatggtgagcggcggggggtaaagagacagcgggatgagaaggatgaacatggccgagcttactatgaattccgagaggaggcttaccacagccgctcaaagtctccactgcctcctgaagaagaggcaaaagatgaggaggaggatcaaactcttgtgaacctggacacgtatacctcggatctgcattttcaagtgagcaaagaccgctatggagggcagccacttttctcagagaagttccccaccctttggtctggggcaaggagtacttacggagtgacaaagggaaaagtctgctttgaggcaaaggtaacccagaatctcccaatgaaagaaggctgcacagaggtctctctccttcgagttgggtggtctgttgatttttcccgtccacagcttggtgaagatgaattctcttacggtttcgatggacgaggactcaaggcagaaaatggacaatttgaggaatttggccagacttttggggagaatgatgttattggctgctttgctaattttgagactgaagaagtagaactttccttctccaagaatggagaagacctaggtgtggcattctggatcagcaaggattccctggcagaccgggcccttctaccccatgtcctctgcaaaaattgtgttgtagaattaaacttcggtcagaaggaggagcccttcttcccaccaccagaagagtttgtgttcattcatgctgtgcctgttgaggagcgtgtacgcactgcagtccctcccaagaccatagaggaatgtgaggtgattctgatggtgggactacccggatctggaaagacccagtgggcactgaaatatgcaaaagaaaaccctgagaaaagatacaatgtcctgggagctgagactgtgctcaatcaaatgaggatgaagggtctcgaggagccagagatggaccccaaaagccgagaccttttagttcagcaagcctcccagtgccttagtaagctggtccagattgcttcccggacaaagaggaactttattcttgatcagtgtaatgtgtacaattctggccaacggcggaagctattgctgttcaagaccttctctcggaaagtggtggtggttgtccctaatgaggaagattggaagaagaggctggagttgaggaaggaagtagagggagatgatgtgcctgaatctataatgctggagatgaaagccaacttctctttgcctgaaaaatgcgactatatggatgaggtgacatatggggagctggagaaggaggaagctcagcccattgtcactaagtacaaggaggaggcaaggaagcttctgcccccctccgagaagcggacaaatcgccgaaacaaccgaaacaagcgtaaccggcagaaccgaagccggggccaaggctatgtgggcgggcagcgccgaggctacgacaaccgggcctacgggcagcagtactgggggcagcctggaaacagagggggttaccgtaatttctatgatcgatacaggggagactatgatcgattttacgggcgagattatgagtacaacagatacagagactattacagacaatacaatcgggattggcagagttactactaccaccacccccaggacagagaccgatactacaggaattactacgggtaccaagggtatcggtgaagcccctgccatggtcacctgtcagccatgaagctgaatctctgggggtgccaggcacccccgcaaaacacaaccaaggaaaacaggggctgtcggggtggggctgagctgccggggaggggtggtggggggggagggtgctcaagcaggggtgggggaggggggaggtggaaacaaacaacaaaactgtacattttttttaaagtttgttgaaaagaatattgtcttattctataaaacatttcaaacctagttagagatttgtaatcaaaaaacatttgcgcagaaagcagcacttagggctgcctgttctataccctacagtcagacaggaaaagaactgaaaatggcacccttctgacattctgaggcagctggactggcagccaagtaaaggagagtgatgaggtggtgtggggagggtggggaggcagcgcgagggtgctctccacagcaggtaggagcaggcaggagtggggacagagggagagcttgtgactgggacagtgaaaataaacgattggctcttatcaatcacttgcaccaactaaccgtttgtattttctttaccgacctttcccttttgggatatgtggtctggtgggctgggaggcttacagtgtcccaactctccattttcctgtgcctttgtgctgtttggctgaggcatggagactgccagtgggtggttctattttacaggattcccaggccaagaaagcctggggactgtccttgatggcagagcagaatagcctgccccttctatagacccattgattaattcctgtaaaatcttggggagaatgggattgcagccctcagcctaaagattgtgatttgccagtctctagtctctgtcttccaaggttgagagaggtgggaggtctctgaaatcatccctgttagagtgtctgtcctcttacagtgcgagagaaggaacgtttctcagggtttcagctcacacgaaaacacagcaggattcttttcactgcagcgggatatgtatataggtgaatcctgtggtgtgggctcacaggcccaggtgctgagaatagcaactagcaactattttctacagtgtggagggctcgtgccctgctggtttttttgatacacaggtagagaatgaatagaagaggggagggtggtgggggggggtgggaggcagctcagtggggctgctgaaccttgggaagagtgtgagtgtgaacgtgtgtaaatgtgcgtgtgaaagggagcaccccttcccgacttctagaaacaaaattccttttggggcgctttccctgtgtgtccccagagaggcctctagccaggagccttcagttgggatagtttcatttgtgactttaccaataccctcccagttcttgatagacagctgtaggttgctgggttcaagaatatgggtgggatatggaatgctctttcaatgtctagcttcagttttcattcatcctcctgctcagcactgtcagccaagagcttactcagcagacaccacatactgcagcagttcctagtgagaaaatctgtgccactagaaaatgcttcacttccatttcctcacctgggcagttctctgtttaaaattgtgggctgatttggtcttcctctcctcctcccactgttactgccctgcagcccttgttcaggtgtacagacccttattctggcctctagtgtccttgtctgtcatgacacacccttccgcccaaatacctctgaccccaaggctggaatggggctggtaggagataagtttgcttactcatagtcatgtcctttctcttggcacctgcttccctgcggtgtcctcaaatggatttctgtgtggcagtggagtgattgcatgaatttttctgtaacacattaactttgtattattattaagggagtttgagaaagctttgcttataatgtcaaggcaaggaggtaaaaactggagcccaaagaaattcccttagggcaagattatgttataatagaaaattgaatttcctgaggcagtggctgccaccccttttcagatgtttagtcctgcaaatagcatctttcttgtagtctgtgacatggatggggatgctagggcccttaggggcaaggggactaaactaaatcaagttgagtttttttccagcaggggttaggggaggtactcgctgttgatatttgacactagaaagtaatcttttttacaaaactgtttttctaggtgggtggaaagtgaaactgccacatccttgttggtttagtccaagagatcatttgcaacaacagtagatgtccgggttttgtttctgtctttttattatgaaaaactatgttaagggggaaaatgtggattatggtaaccagaggaatccctagccttgttttccttagaagacttgtttagtgttttatcagacgtctgttgtagttgtagacaggaaagcttgtgagaaaaacaccacatggagcctgtaaatgtttttgcacaacctgtaaagcattcttggaagtggccagtaaaaaggggttttaccatttaaaaaaaaaatgtaactgtgtcattgtttacatctgtaactttttcctcccctgttctcattacaccattctggcgaaaatgtaggcaaagtagcttccagttttagaataaataaccatttggattgaattc

SEQ ID NO: 7490 - DNA, 210 bp, Homo Sapiens
  XM_938322
atgtggcttgattctgccccacacctgtgtcgcccctgtcataatcgtgagaaagccagaggccttgggaaatacatctgccagaaatgccatgctatcatcgatgagcagcctctgatattcaagaacgacccctaccatccagaccatttcaactgcgccaactgcggtctagaaaattttaaacctatagaagagtcaggagaatga

SEQ ID NO: 7491 - DNA, 609 bp, Homo Sapiens
  XM_938324
atggcggcgccttggaggcgatggcccacggggctgctagccgtgctgcggcccctgctcacctgccggcccctgcaaggcacgacgctgcaacgggatgtgctgctctttgagcatgatcggggccgcttcttcaccatcctcgggctgttctgcgcgggccagggcgtcttctgggcttccatggctgtggcagccgtgtcccggcccccggttccggtgcagcctctggatgcggaggtcccaaatcgtggccccttcgacctgcgctccgcgctctggcgctacggtctggccgtcggctgcggcgccatcggagccctcgtactcggtgctggtcttctcttctctctccggtctgtgcgctcagtggtgcttcgagctggagggcagcaggtgaccctcaccactcatgccccctttggcttgggggcccatttcacagttcctttgaagcaggtatcttgcatggcccaccggggtgaagtccctgccatgctacctctgaaagtcaaaggccgacgcttctatttcctcttggacaaaactggacacttccctaacacaaaactctttgacaatactgtgggtgcctaccggagcttgtga

SEQ ID NO: 7492 - DNA, 3035 bp, Homo Sapiens
  XM_938339
atgccagcaccacgctttctgtacagcctaaggaactatgagccaatgaaacctcttttcttcataaattacccagtctcagatatggagttaccagtaaggagctccaccgtgactctcctccctgctccgttgccccgacgaggaagtgtgaaaacgtttctggctccatccaagagttacttccctgaagaagagagggctttgttgaagtcttcccatgctttctgcacagggctctggccttggagaagggatttccagttaccgcagtgtcacttggccctgggtctcctcccgggagagagaagtgtacggctcccaaggttcctggcagttttgaaagagctctcagccacagccagctttactttggcaagtgaggccatcccctttctttcctcctttcctttcccatggaacctactccttccatctgtctttcaagctctgcctcagaaatggcaattcaaggctgattttctccttgaatgcactctctctgtgaaagaggcttttcaccaagaatgtggtgctggtgtttctcttgccaatgggctaaacaaaggcctccgcaccgggtaacatttgggcaggcctcttcacacatgcctgtccttctccgtcgcacttggctaaagccaacaacctatgtgtgaaaagtataaagagatggaaaaattcccatgaaaaatccttccgcaaagcaattgcgagacaactatggcgtcatctgataacatgatttctattttgcatctgttccattgttggagggcactcatagttgcaagccttgcatgtacatatgtaaaaattataagtgaatgcatctgctcaggttattagccactgattgtgaaataatctgaagtttgagagtctcagttaataacctataggtgctgagagcattcaaagacccaatagcataagtattaatcacctcttttctccagagtagcaaataagaaaccaggaagagctcagtttcacttccaacttgttctttaagggcctcagagttgatagttgtcctcatctgggctccctaatgccacgacaaatcaactagaaaagaaatatgccccaaatcagcacccaaacacgctggtgccagcctgtgtccatgttcctgcaacagctgctgcccacggggtaggactgagccaggtctaagattagcagtgtcccagctcctcaggttcctgcacattgactcacaacggaatcaaaactcgggagctcaactctctggtttcttctgctttctcttctgcaattttctttcttttttttttttttaactttattttactggcaaccatgaaagagatatttacagcaagactcagagcaaggtcagagacccctaaacaggtggttttcccttaacttatcaggctggagcagagtttaaaccaaactagaggaatccctctagctctgggcacaatgtaatctctacatcctggccttcatcgcattggctggaagctggttggcttcatccaagggcctacttcgaggggattcatgcctctgcaagtttgagcatccctcactcctggcgctggcggtgccactcagccacggactggagcatccacttggtctggagcttgtacaaatagtagccataaaccacgactttggtgaggtctgaagactccagaggcttcagctcgagcatggccttgctcaccagctcaatgtaagggattcctccctcgccaacctccagagagttaaagacatctctaccacccggtggagaagaaagctgaccactggtgtgcttccagaatgcgagaagctcttgaagcccaacattccctttcagtgatattactgacattttcccaaagctgtgttcttcagagctgcacatggcattgttaacaactatttcttaaaaacatttcttttagagacgggattttgccatgttggcaggttggtctcaaacttttgggctcaagagatccaccctcctcagcttcccaaagtgctgggattaacaggcctgagcactgcgcaacaactattgaaacccttgtcaggcgcctgttggacccctggagcctggttaatgggaacgaccacagtgggcatcaaatgggtaacttcagtacgccagcacggttgagaactattgttcaacgcgaacttcacatatgaagcccctctcatgtgtcaggcacggcgtcagatgctggacggcaagaaggtggccttctgcaaatggggatgagtcctcaccaggtgtgggatctgccagcacctcgatcttgggcttcccagcctcagtactgtaagaaagtttcgctctttcacccaggctggagtgcagtggcacgatcttggctcacttcaacctctgccttccggtttcaagtgattctactgcctcagcctcccaagtagctgggattacaggcacccaccactatgctcggctaatttttttgtattttcaatagtgacagagtttcaccatattggccaggctggtgtcgaactcctgacctcatgatctgcccacctctgcctcccaaagtgctgggattacaggcgtgagccatcgcgcccagcccataagttttagtgcctttttttcatagatgctgaaactgaaaaagggtgtggttaaataatttgcccaagccagtctctggcaaagatgggattcatatccagctactgatgaccaaacatggtgagcaggtatcctatgtcccgaggaagcccattccacctgagcactggatggaagggatatcgcaatcacccccatgcatgatggacaggtctaggagcattggacactcaatggaaactcatgcccctgtcagaaattggcaactgccacttccacggcacttgcaaactttgcacacggtccagatgtggcctggcttgttgctgtcatggtagcaatagtaattacttaggggatttctgcagatcttgctcatattgtgcataatagggtataaaatatggaaaatttgcctctaaaataaagtgttgct

SEQ ID NO: 7493 - DNA, 531 bp, Homo Sapiens
  XM_938382
atgaaggccccgggcacacgactagagtaccaggtggtgggtcgctgcctgcccgcccccaaatgccacacaccgcccctctaccgcatgcgaatctttgctcctaatcatgtcgtcgctaagtcccacttctggtacttcgtatctcagttaaagaagctgaagaagtcttcaggggagattgtctactgtgggcaggtgtttgagaagcgccccctgcgggtgaagaacttcggcatctggctgcgctatgactcccggcgcggcacccacaacatataccgggaataccgggacctgaccaccgcgggcgctgtcaccaagtgctatcgagacatgggcgcccggcaccgcgcccgggcccactccatccagatcaggaaggtggaggacatcgcagccagcaagtgccgccggccgaccgtcaagcagttccacgactccaagatcaagttcccgctgccccacagggtcctgcgccgtcagcacaaaccacgcttcaccaccaagaggcccgataccttcttctaa

SEQ ID NO: 7494 - DNA, 2362 bp, Homo Sapiens
  XM_938667
atgccacaacaatgcggactcggacctattcggactgattcggcttcccacttcggggaacttcgaccctcctcggttcaggactcggtctcggctcggcggcttcgtgcaggttcggctcctactcgggcagcctctgttcgcctcggctccgctccgcgggcggactcggctcggctctgctcggcggctggctgccttttcggtccctattcgggcggcggcttcgggcggcctcggcccagctcgggcgtcctcttcgggccccgcttcgggctccgcgaccggcgcttcgggcggtcccggacggcgccttcgggaaggctcggcggagtccggatggaggactcggactcggcggcaaagcagctgggcctggctgaggcggcggcggtggcggccgcggccgctgtggcggcggcggccgcggccgcggcaggaggcgaggcggaggagccggtgctgagcagggacgaggactcggaggaggacgcagactcggaggcggagcgggagacgccgcgggtcacggcagtggcggtgatggcggcggagcccgggcacatggacatgggcgccgaggccctgcccggccccgacgaggccgccgctgccgcagccttcgcagaggtgaccacagtgacagtggccaacgtgggggctgctgcagacaatgtcttcaccacgtctgtggcgaacgcggcatccatctcaggacatgttctgacaggtcaccatgttgtccaggctggcctcaaactcctgacctcaggtgcccgccttgacctcccaaagacagagtctcaccctgttgcccaggctggagtgcagtggcttgatcttggctcacagcaacctccacctcccaggctcagaggattgtcccacctcagcctcctgagtagctgggattacaggtgtgatctgcctgcctcggcctcccaaagtgctgggattacaggtgtgagccacaatacccgcctgggcaacccaacaagactctgtctcaaaaaaaaaaaaaaaaaaaaaagaatttttatatttatgaatggtaggtaagtggtaaaagtggttgaaatcttctattattgaatgattgacatttaggggctgacttgctaatgcatggtggttcttttcacatctcaggatgggatcttaaaccctcacgctgcctcttgcacctgtgctgcctgctgcgacgacatgaccttaagtggcccagtcaggctttttgtgccttacaaaaggcgcaagaaggagaatgaactgcccacaactcccgtgaagaaggactcccccaagaacatcacattgcttccagccaccgcggctaccaccttcaccgtgaccccctcgggacagatcacgacctcgggggcactgacctttgaccgagcgtccacggtagaggccactgctgtcatatcagagagtccggcccagggcgacgtcttcgcaggggccacagtccaagaggccagcgtgcagcccccatgcagggccagccaccctgagcctcactaccccggctatcaggacagctgccagatcgcaccgtttccagaagctgcgttgccaacgtcacatcccaaaatagtgttgacatccctgcctgcgctggcggtcccacccccgactcccaccaaagcggcacctcccgcgttggtcaatgggctggagctgtcagagccgcggagctggctgtacctagaagagatggtcaactccttgctcaacacagcgcagcagctgaagacgctgtttgagcaagccaagcatgccagcacctaccgagaagctgccacaaaccaggccaagatccacgctgacgcagagcggaaggagcagtcctgcgttaactgcggccgggaggctatgagcgagtgcaccggctgccacaaggtcaactactgctccaccttctgccaacgcaaggactggaaggatcaccagcacatatgcggccagtcagcagctgtcaccgtccaggcagacgaagtccacgtggctgaaagcgtgatggagaaggtgaccgtgtgaggctccatcggccgccctgggagctggggcccctcgcactcctgtgaggcttttgcaggtcgaaggcccccctgaggactctggggggacgttgagaagaggggtgtgggaaggtaaagaaacttgctggacaagtcattaacacactttaagcgaatggtgccctgggaagcgcactccccctgcccgggccccctgcccgctcgcggacagattttttatccctgggatcatgagcgtccggtcttgcccacagggcctgtgctgcgacgcacatacatacgtgttgtgtctgtcaataaagtgtaaataaggtctc

SEQ ID NO: 7495 - DNA, 3061 bp, Homo Sapiens
  XM_938703
atggagaagtcccacaataggccatctgcaagctgcagaaccgaagaagctggtagcacgattcactccaagtctggaagcctcagaactagggaagctgagagctcccagctaacaggacagtgcacgcccgcattgaaagtggatcttacctgttgcagtccactgtctcacacaccaagctcccctggaaacactctcaccgacacacccagggaacaatgtttcaacagccgtcttggcatccctcaatccagtcaagctgactcgtacaacaactatgaccgggctgtcatcaataccgttccttatgatgtcgtccatcgctggtatacagcacaccggactctaacgatagagttgaggagacctgagaatgagttttgggtcaaactaaagcctggcagggtcctatttatagacaactggcgtgtcctacatggcagggaatgcttcactggctaccgccaactgtgtggctgctatttaacaagagatgatgtattaaacactgctcgcctcttggggcttcaggcttaaaattgacagcatctggattatgaatacacctggcaccctggctaccagaatttcatatgggcagaataatattgtgtcaaactctacttcagattgtctccttatcccatcccacaaaacagaatctgtccgtttctctagtaagggagacttgttggagaggcgggactctgagttatctaatgtcagacatctagtggggcagctctcttcctcatgttataacatggatccacttgttttatttaaaccttttaatataattttggtcagtctccttcagaaatataatctccatattgataggaaagcaataattgccatgaggtaacgatttttttcccaagtagatcagttagaaagaaatgcattctagaaataacaaaaatcctgataaagcaacaatttgcaaaatgtttggtcttaggacaccttaacactcttaaaagttattgaaggccccaaggagttcttgggtgtgggttctatctattgatactaattattttaggtattaagactgagaaatatttaaagctcaagaagaacacagaagcacacatccctcagctatgagagagatgacataaccatatgtcatgtagcctctggaaaagtcctctgtatcctcatgagataacgagagggggaaaaaaagctactactgcctttgtaacttccacttagcctactacagggctatgcacatcttagtttccaaaagtctgcttaatttcaaaagaaaaatgcctaattgaatgtaactcatcttggtgttattatacaaaataatttttaatctgcagacccacgaaaagggtctcagggactcctccaggggtcttcagaccatactttgagaacccatgggctagcgactaccttgagacagtcctttacctaggcctgtggattaaagggtttagctgaaaccctagattcttctctgtagtctaatagaactccaaacattgtaagaattgcttggtagcataagctcagggataaggtgggaattgagttcaaatatagtgttttatcttccacacaaatcatctctataggagttaaattaggaagtcacaacagcgcctgttgaacaaactcatcagtgtggtaatcctatgagggataattgcagaaaggttttagagacttgtgaggttccatatgataattctttacacctcccccccccaagagaaagtacacagggctattctgtaatattgttcagggaaatcagcatgatagatgctgtgcctccagagagttctctggagattactacccaaatgtgtattttggcaatttggtggtatttaggatgtaatatgttttcctccatttctgctaattttctctctctctctctcataacatactatacatgctaattgccaagatttgaatgagtcaaatttagtagcttgctgcttttattttttaaatggcttcttttacgtattggcgggggcggggggggggggcagggtatgaggcttcttttccctcagctttcattgaaagtgaagctgtacaataaccacattgaccactgtagaatgatgaaagagaatataggctaggatgcacacaagaggggggaaaaggcattattagtgaagataggagttacaaagcaaagcaaagtcagtattcagatagagaatagagcctaatctgatgtttgcagggagttcctagatcacatttggcaatttacacattattttattgacctatccagtgctccaaaatgtgttccaaaatattttggcattttatttgtactatataggaatctttaggggagtccctgaaatttgttttcctcttaggtcaaaggactgataattaactttggttcttaaggagtatgccctttagcaataagaacagcaataacattttaccctgcagttttttctctatacctactattatgcactcctaaaatatgtcatcattagtcttcatgaggatgtttaccatttctgaagttttgcgtaaattagccttgaagattacactataactgaggtcatcagcattgacttatggccagcaaaggacatgctcatggccctggagagatgaggacacaaaacaaatcaatttccccacttactgaaggactccccttaccttctgtctctcctgagaccttgactcattaattattttactctcctttttggaaatttgcaaccggtccttctcaacaatgtgctccctttagtacactgaagaaaaagagaagggaattatttgagtcctgatcacgatgcattgaaaacttcctatgtgagatgtttctgtttttatatctcttccaggtgtccctgagtatataagcatgggtctatgtctaccaagctcactgtagagtcacttttaccttttgctatggtggaatgggatctgtagggtcaggaacacagcacctaacacagtgccttatggatagtagttttataatacagatgtgttggaagaataaatgaatgggtccttttca

SEQ ID NO: 7496 - DNA, 4818 bp, Homo Sapiens
  XM_938742
atgcaaaagtctggaaaacatctcaaaagacaaatcttaggttctgcaatactgatgttatatgatgatgatgatgatacagatataggagcaattgaggaagtcacacgcctggcttatgtacagaagtacgtcgtgaagaattatttctactattacctattccaattttcagctgctttgggccaagaagtgttctacatcacgtttcttccattcactcactggaatattgacccttatttatccagaagattgatcatcatatgggttttggtgatgtatattggccaagtggccaaggatgtcttgaagtggccccgtccctcctcccctccagttgtaaaactggaaaagagactgatcgctgaatatggaatgccatccacccacgccatggcggccactgccattgccttcaccctccttatctctactatggacagataccagtatccatttgtgttgggactggtgatggccgtggtgttttccaccttggtgtgtctcagcaggctctacactgggatgcatacggtcctggatgtgctgggtggcgtcctgatcaccgcactcctcatcgtcctcacctaccctgcctggaccttcatcgactgcctggactcggccagccccctcttccccgtgtgtgtcatagttgtgccattcttcctgtgttacaattaccctgtttctgattactacagcccaacccgggcggacaccaccaccattctggctgccggggctggagtgaccataggattctggatcaaccatttcttccagcttgtatccaagcccgctgaatctctccctgttattcagaacatcccaccactcaccacctacatgttagttttgggtctgaccaaatttgcagtgggaattgtgttgatcctcttggttcgtcagcttgtacaaaatctctcactgcaagtattatactcatggttcaaggtggtcaccaggaacaaggaggccaggcggagactggagattgaagtgccttacaagtttgttacctacacatctgttggcatctgcgctacaacctttgtgccgatgcttcacaggtttctgggattaccctgagtctcaaacagttggaaactagcccactggacatgaaagccaagacataggaaagttattggtaggcaaatcttgacaacttatttttctttaacaacaacaaaaagtcatacggctgtcttgctactaccagataaatgatgctgctgtgtgaaaggaagaactgtctcatagcggtcattggtcgtccgtggtggttggttgtgctacagttgaacccaggctaaagaccataatccggatctttaaaggcacacaccgcgccccccccccccccgcccggcccctgctcctctcgctgttgcacgggctttggatctagtcatgggctggcaggaattgtggcctggcttaggaatagctatgagccccactgggttctggagagccagtagagatggggtgatctgggaggctggaggtagagcctttcttttccgttacaaccttgcctagcatggagttatttctaaaatgggaactttggtctaggagaaggggtggcaccatatgaaacggcattccttggacagggtgacttccttatcgtttatttggtgtttttttgttttgttttgtttgagacaggatcttgctctgtttcccaggctgtattacagtggcacaatctcagctcactgcaaactctgcctcccgggctcaagcaatcctcctgcctgagccaactgagtagctgggactgtaagcatagaccaccatgtgcccagctaatttttgtagagacagggtttctccatgttgcccaggtacgtctgaaactcctgggcttaagtgatccacccacctcagcctcccaaagtgctgggattataggcatgagccactgtgcccggcctcctccttgttatgatcaaattagactgtgcctggttgggtggtaagatcactctgaaagaaagctcactgtgaagagatgaaaggtggaggcagagctgtgaggtcatggggaaaagcctgctttccttataagtcctgctgttcatgttggaataaggatctgctcttccttgtttccatgcattttgcaggattccaggtaccattaccacactcttctgacccatgaaaccaactggctgctcacacatcaccaaacaggttgggggttagccttcagcacaggtggatacatctgggattcactgagattcctgccctctcctgcttcctagtggtttgggacaggccctctgcccatcgtcagcagttttttgctttcatacaaacctggaaggcactggcatctgcctaggaaagtggatctgtgaagaacagatgaactcaatcctttctggagtctgacaaagaagggataggcttccttgacattgcctgtcctgacaaggcctccctgacattactcctccaatttcacagttaccttctgtaaatctattttctcatctactgaatagaatcaggcgccctttttgtcttcccacctcttatctcttggcaattttaaggggaattaatgcaagaacaactttagtgtctcttgggaaaacaagccaaccaaatacaaaacccattaagcctactagggtgagtcctcttaacatgggaaggcgatgattatgcaaacaccagagttccctcctcttcagttcctaagaataaagaacaggtatcaagaactttctttaaagttagtgtaactatagttaacaaagtatccattgaagtttagtgcctgtaggactgagccagtgctttatcaacccaacacatcatcaccatgtgcatactctagaaaaaaaaatagcttccttaaaagttacagaggctcttaacgtgttaaaaccgaaaaatcacatttttcttgatttcaaatatgttctacggccttactgttgggatgatatttagtatgtaacttagcattccaatttctcaagaatttttaggccgggtgcggtggctcatgcctgtaatcccagcactttgggaggccgaggtgggcggaccacgaggtcaggagatcgagaccatcctggctaacacggtaccccgtctctactgaaaatacaaaaaaattagccggacgtggtggagggcgcctgtagtcccagctactcaggaggctgaggcaggagaatggcgtgaacccggtgagcggagcttgcagtgagccgagattgcgccactgcactccagcctgggcgacagagcgagactctctcaaaaaaaaaaaaaaagaatttttagcaaaacatcctgtttttacttaaaattcttctcatatttattatagttagaaggcaaagatcaagatgacctgccgtttgactgcttttacatcaaactctgcccagtatttgcagcacaactcaggggaagggccttagcttacaggtactcccagccttcatctgcccctgcagagcagtggctgtcagccggatgcggcacttttctgtattttcatccacacagctgcccagccagagttcgcaacactggatatttacaccaaataattgtggttgacttgtctgaagccagctgacaaaaggatcagcttttcccacttgtattttttaaaaagagggattgtgatcattgtcacagagtgggtgctggcctctcatatatatgatatatatatatcattttatatatatatatatatcatatacataatttttactgctgtctctagttttaagtcccaacaataggaaggccgatcagctatattgatatatttaaggctgtacttaactaatttgggctgaggatgaatatatcagccacagcacattaaagaatgagccaaggatttgtcatggttggtcactttttaaagtatttgattactgcaactggagaatgaaaagtgtatattggtgacgccaacctcagtttctgagcactcctgctctgtggtgagaatcagacaaaaattcatcggggtgaaaaaaaaaaggcattacctgattcacacccttgtcttgctagccctcttccattcatttctcacacagcactttgctctgttaaatcctctctctgtctcagaccattgcttgccccttcaaagggtatggttcaggctcctttcaagacatttggagtttctctctggggaaagagagccccctactggtttggcttcagtctaggtccaccatccctctcgatctggcatcttggagattaatttaaaaggcaagctcaccacaatgtaagcctatggtctggccaaccttgcttttgggaactgtgacaccaaagcccccaggactatctgcctctccaggagccagatagaatgacatgcctttttcctaattgtccacattccacccccaacccactgccactgtgggccaagccatccatcttgcaatcttcatctaaaacagctctcatttcatgccagttttgctcaaacctgcaccgtcacaagatattcagaagatgaaaacgtagaagacacccctgaattaaaaacacttacatagcagtggctggaattactccaaaacgtgcccagtgatcgcactgtaacatgggattttctcacccaaataggcaactcatgcttcctgagtgtaatcaaagcatgtggtgttttggggccatatgcaccaggtttctattttagaaaccttcagctgtcttgcttatgtaccgtatgtaaatttattctttttaaaaatcacttttatttgattttgacttattaaatgctttaaa

SEQ ID NO: 7497 - DNA, 4095 bp, Homo Sapiens
  XM_938773
atgcacgtgcttaaagagcactgtaatacacatgaaaatagttctggcgtcaaacttgaaattgttcaaaaccgaagcagggctgccatcaccaagtaccataaactgtgtagcttcaaactacagaaatttgttgtcgtagatttctggacaccagaagtcagaaaccagcgttttgaaggaagaaagtactgtgaacatgactttcagatgctctttgccccttgctgtcatcagtgtggtgaattcatcattggccgagttatcaaagccatgaataacagctggcatccggagtgcttccgctgtgacctctgccaggaagttctggcagatatcgggtttgtcaagaatgctgggaggctatgtcttaaacattttgtttgtgccaagtgtgagaaaccctttcttggacatcgccattatgagaggaaaggcctggcatattgtgaaactcactataaccagctatttggtgatgtttgcttccactgcaatcgtgttatagaaggtgatgtggtctctgctcttaataaggcctggtgcgtgaactgctttgcctgttctacctgcaacactaaattaacactcaaggataagtttgttgaaattgacctaaagccagtctgcaaacactgttatgagaaaatgccagaagaatttaagaggcgacttgccaaacgggagagagaagcaaaggataaggacaagcagaaaaagaaaaagccagtctgtttgaataagtttgtggagtttgacatgaagccagtctgtaagaagtgctatgagaaatttccattggagctgaagaaaagacttaagaaactagctgagaccttaggaaggaaataagttcctttattttttcttttctatgcaagataagagattaccaacattacttgtcttgatctacccatatttaaagctatatctcaaagcagttgagagaagaggacctatatgaatggttttatgtcatttttttaattaaaaaagaaaaattcatataatcgtgtttaaaacacaaatgaagtcagtatttgcctttgttaacccttatccatttgttgacatgtagactgtttacaaaaaaaaaacacatggttaaatgttaaattttaattaaggcccccaaaaattaaatataactttttaaaatgaaaggagtcaccttttacatgactcaggtgaaaaaacagtataaacattaatttactttgtgttcaaaagaaaattccaactgctgttggggaaggacacagaaaagaaaaataaccacccaagaaaaacaaaaacaagaaaaacaaatcttatacaatcttagtatatttatcaaactagtagctagaaagtgaatatgcacattactaagacaaaaaacaagtgtaattcagaactacttgattttttttagttaaatgcaataattattatgcttagttttataacctgctctccttgtgaattattccttcaaatgattacttaacgcagtagtaatagctagctgtaggatgtcctttaaatttttgtgcaaaaaaaaatttataccaggtatttggaaatatactttacaatattggaaaatgaagtatttttaatgtattacagcaattatgtttctaagcttaatgttaagcatgtagtcttagaataggacatgaaattaaattgtatgtagcttggaatatattgcttcagaaaactgaatgtgtatgtcggtcatattgcctttataaccatgctaatatctatgctttatacatactcaaacttgccttgccttaaaaaaatacatactacatacttaaatcaggaattctagccatctcacagaataccaactaaaactaagtgcattgagatctgagattggtaaacccagattcatttaccacagctgtaattaagtttttagaaactattctctttttggggaaatccattgaagttaatttctgttatcttattagaagaaaatgatgttgatatgtgtttcagattttccatttgaaatcttataattaatttgatttatttactgtaagtaggaggtataaatgacactcttaaattggaacgaggggtgttttagtgtctgttttaggtcaaaattagtgattctatttttatcaaaagttttatcctgaagtttcaggaccactcttccttaataaacttgttaatggaaagcgagctttatgaacatttaaaaatgttgctgctgctttgttgcttaaaaagaaagttgccaagagagacttcttagggaaaatatttgggtttttttttccaaaaattgctgaaatattgttttgccatttttaaaaagtctcaggttattaccactctgccattaaatatttgtatgcctgcatttttaaaaattctgtgcatgtactttatggagtacattctatttttgttttcagataccctacaaccaattttttttagtaatcttttagaattgaaattatcataaatgatcgagaataatcatcacatagtttaagattgtatatgttgagtagtttaaaacaatctttgcattttacagtaagaatcaaagtcccttcagtgtgcctttgtcagctaatatgtgaccagcaatgacaaccttgggagtatttattaaatattatgctatgaatataggcaacacagaacagggtttgcagtatagcgtcttgatgctaaattctcatatacctctacacgagaaatatggaggagaaaaacaagcatttacatatattcttcgtcactttgaagatgcatgacctgaactcgactgcttgtgtttgtttacatatcaggcatacccaggcatctcctgcagccagaggttccattgctgtctttgctcagtcctcttttaaaatatgaattagtggacaggcacggtgcctcacacctgtaatcccagcactttgggaggtcgaggcaggtggatcacgaggtcaggagatcaagaccatcctggctaccactgaaaccccatctctactacaaaaaaattagccgggcgtggtggcgggcacctgcagtcccagctactcgggaggctgaggcaggagaatggtgggaacctgggaggcagagcttgcagtgagccaagatcacgccactgcactccagcctgggcaacagagcaagactctgtctcaaaaaaaataaataaataaattatgaatgagtattttctagaaattcaacttgctaagcctgtaatacttaagggtagtttatctagatacagtactttcttccctgataagtagtatcattggagcccttaggtataggagaagaggaagaagtttaaaaagtgtaagtgggccgggcgtggtggctcatgcctgtaatcccagcactttgggaggccgaggggggcggatcacgaggtcaggagatccagactatcctggctaacaaggtgaaaccccgtctctactaaaaatacaaaaaaaaacattagccaggcgtggtggcgggcgcttgtagtcccagctactcgggaggctgaggtaggagaatggcttgaacccaggaggcggagcttgcagtgagccgagattgcaccactgcactccagcctgggcgacagagcaagactccgtctcaaaaaaaaaaaaaaaagtgtaagtggattaaaagagaaacttggtctagttcataatatttttaatagggctttccctggctgctggaaaacttaggccagtaagcatctctttgtttaaagtcctacaagacaatttgaaataattcattgttcatgccaaaattctaagtactgtttttcttagcaagtgtaacataatcaggaacaatgggtacaagtaaaacattctttggatgatattcaaagccttattagcactgcacctgaataataggtcattttgcctcactcatttgccaaagtagccatttctaagttaaggaagtttttagataggctcatagccttgtatttcgttttagattgtaagctcaatggcagggatactatattggtaattatgttttcatatagcaaccaccacagtatattcttggtgcttaataaatgtttataattgttaa

SEQ ID NO: 7498 - DNA, 1730 bp, Homo Sapiens
  XM_938779
ttttttttttttttttctgcaataaaaaatggcctccaacaaaactacattgcaaaaaatgggaaaaaaacagaatggaaagagtaaaaaagttgaagaggcagagcctgaagaatttgtcgtggaaaaagtactagatcgacgtgtagtgaatgggaaagtggaatatttcctgaagtggaagggatttacagatgctgacaatacttgggaacctgaagaaaatttagattgtccagaattgattgaagcgtttcttaactctcagaaagctggcaaagaaaaagatggtacaaaaagaaaatctttatctgacagtgaatctgatgacagcaaatcaaagaagaaaagagatgctgctgacaaaccaagaggatttgccagaggtcttgatcctgaaagaataattggtgccacagacagcagtggagaattgatgtttctcatgaaatggaaagattcagatgaggcagacttggtgctggcgaaagaggcaaatatgaagtgtcctcaaattgtaattgctttttatgaagagagactaacttggcattcttgtccagaagatgaagctcaataattgttcacattgtttttttatatatatttatatatatatataaaaattgggtcttagattttgatttactagtgtgacaaaataactacatcctaatgaaaatcaagtttgatatgtttgttttgaaagtagcgttggaagagttgttgggggttttttgcatccatagcactggttactttgaacaaataaataaaagctttctgtagttgcttcctttatcagaaaagaacatttgataccatggtatatcatttcctcttcattaaagaacagcttttctaaatgttgggggaaatgtccatagtcattactcagtcaaaacttgtgttctcataagcctaaggaccattctagatttattacgtgttttttgtgtgtgtgtgtgtgtgtgtgtgtgtatccataaaatgcatatgtaaatttttttttgtttttaagcattcacccaaacaaaaaaatcacaggtaaacccatgtttctgagatgccattattccaagcaaaataagagataatcccttcaagttaaattgaaaattttcctgaaaccatacatttcaagtgaaataagtaattctagataggacaatttaaattggataattttaaagtgtctataattgcagtggtttatttgcaaaattcctaaaaggaaaaattttatcactgccatcacagcaggtttcctcatccagatgaggaaactagacaaatgctagtgtgttttaactagctaaacaaaactaagttaaatgaacatttaaaagtttccctagcgggccattccttagcaaaatgttggaatccctgttgctacattgactaaaaggtcatgatgaatggaatatgtaagacttggctcatagaaacctaatcagatggttagaggtgttggcagtttaggacctgctgtcataaatgtgtgaacaaccttttgtaacctaacctattgacctgcatgttttttctttaccccaattcattacatggaggctcaatcttgagtttgctttactggttcagcaaaagccaggaagaacaactttgtagtaatcaaaatgttatccaactgtatattgtttactttattgtaaatactgaacagtggttaataaatagttatatatttctttaaaaaaaaaaatata

SEQ ID NO: 7499 - DNA, 644 bp, Homo Sapiens
  XM_938790
gggttctaggcacttcgggaccggcagcttaaggtgcagacatggccaagtccaagaaccacactacacacaaccagtcccgaaaatggcacagaaatggtatcaagaaaccccgatcacaaagatacgaatctcttaagggggtggaccccaagttcctgaggaacatgcactttgccaagaagcacaacaagaagggcctaaagaagatgcaggccaacaatgccaaggccatgagtgcacgtgcccaggctatcaaggccctcgtaaagcccaaggaggttaagcccaagatcccaaagggtgtcagccgcaagctcgatccacttgcctacattgcccaccccaagcttgggaagcgtgtttgtgcctgtattgccaaggggcccaggctgtgctggccaaaggccaaggccaaggatcaaaccaaggcccaggctgcagctccagcttcagttccagctcaggctcccaaaggtaccgaggcccctacaaagccttcagagtagatatctctgccaacgtgaggacagaaggactggtgcgaccccccacccccgtccctgggctaccatctgcatggggctggggtcctcctgtgctatttgtacaaataaacctgaggcaggaaaaaaaaaaataga

SEQ ID NO: 7500 - DNA, 684 bp, Homo Sapiens
  XM_938906
atgaccctgagaaaatccagtgtgtgcttttcagagaatgacatgtctcctcagaaacaaccagctgagaaggctacaagtgacgacaaagattctgtttcaaatatagccacagaaataaaggagggacctatatctgggacagtgtcttctcagaaacaaccagctgagaaggctacaagtgacgagaaagattctgtttcaaatatagccacagaaataaagaagggacaacaatctgggacagtgtcttctcagaaacaacaagccttgaaggctacaactgacgaggaaggttctgtttctaatatagccacagaaataaaggatggagaaaaatctgggacagtgtcttctcagaaaaaaccagccttgaaggccacaagtgatgagaaagattctttttcgaatataaccagagaaaaaaaggatggagaaatatctaggacaggtaattttgcgaaacacatttaatgtcatgttcagtccagataagaagttctcttccccgaataaatcagtggggggctggtcgaagctgcacattctgactcagcaggcctgagattcttcatttctaataagttcttgggttatgctgatactgctggtctggaatatgatcttggctgtaagattatacacatccccacattgcaactgggaggaagaaatatagagagc

SEQ ID NO: 7501 - DNA, 1105 bp, Homo Sapiens
  XM_938988
atggatgatgatatcagcacgctcctcatcaacaagggctctggcatgtgcaaggccggcttcacaggtgacaatgcccccgggccatcttcccctctgtcatgggtgccagggagtgatggtgggcatgggtcaaaaggactcctatgtgggtgatgaggcccagagcaagagaggcatcctgaccctgaagtaccctgtggagcacggcaccaactgggacgacatggagaagatctggcaccacaccttctacaacaagctgtgtatgactcctgaggagcaccccatgctgttgacccaggcccccctgaaccccaaggccaatcataagatgacccagatcacgttcgagaccttcagcaataccccagccatatacatggccatccaggctgtggtgctgtccctgtacgcctctggccttaccactggcattgtgatggactctggtaacggggtcacccacactgcccatctacgagtggtatgccctcccccacgccatcctgcgtctggacctggctggcctggacctgactgactacctcatgaagatcctcaccgagtgggcgctacagcttcaccaccacggctgagcaggaaatcatgcatgacatcaaggagaagctgtgctatgtcaccctggactttgagcaggagatggccacagtggcctccagctcctccctggagaagatctacgagctgcccgacctcccgatagccaggtcatcaccatcagcaatgagaggttccacagcccccaggccctcttccagccttccttcctgggcatggaatcctgtggcatcctactgtcaactccatcatgaagtgtgacatggacatccgcaaagacctgcatgccaacacagggctgtctggcggcaccaccatgtaccctggcatggcaggacaggatgcagaaggagatcaccaccctggtgccgttgctcctctggagagttagtactccgtgtggatcagcgactccatcctggcctcgctttccaccttccagcagatgtggatcagcaaggaatacgacgagcctgaccccttcctcatccaccgcaagtgttctaggcggattgtaacttag

SEQ ID NO: 7502 - DNA, 1228 bp, Homo Sapiens
  XM_939003
atgtaccgcgccaaaacaggaagggctgagacccccacctcggccagcagcatcactggagcccagggcagggtcagcagtgctggccgtggggccctctctcagccaggaccaaggacagcagcctccaccaagggcccatcggtcttccccctggcgccctgctccaggagcacctccgagagcacagcggccctgggctgcctggtcaaggactacttccccgaaccggtgacggtgtcgtggaactcaggcgctctgaccagcggcgtgcacaccttcccggctgtcctacagtcctcaggactctactccctcagcagcgtggtgaccgtgacctccagcaacttcggcacccagacctacacctgcaacgtagatcacaagcccagcaacaccaaggtggacaagacagttgagcgcaaatgttgtgtcgagtgcccaccgtgcccagcaccacctgtggcaggaccgtcagtcttcctcttccccccaaaacccaaggacaccctcatgatctcccggacccctgaggtcacgtgcgtggtggtggacgtgagccacgaagaccccgaggtccagttcaactggtacgtggacggcatggaggtgcataatgccaagacaaagccacgggaggagcagttcaacagcacgttccgtgtggtcagcgtcctcaccgtcgtgcaccaggactggctgaacggcaaggagtacaagtgcaaggtctccaacaaaggcctcccagcccccatcgagaaaaccatctccaaaaccaaagggcagccccgagaaccacaggtgtacaccctgcccccatcccgggaggagatgaccaagaaccaggtcagcctgacctgcctggtcaaaggcttctaccccagcgacatcgccgtggagtgggagagcaatgggcagccggagaacaactacaagaccacacctcccatgctggactccgacggctccttcttcctctacagcaagctcaccgtggacaagagcaggtggcagcaggggaacgtcttctcatgctccgtgatgcatgaggctctgcacaaccactacacgcagaagagcctctccctgtctccgggtaaatgagtgccacggccggcaagcccccgctccccaggctctcggggtcgcgtgaggatgcttggcacgtaccccgtgtacatacttcccaggcacccagcatgggaaataaagcacccagcgctgccct

SEQ ID NO: 7503 - DNA, 1313 bp, Homo Sapiens
  XM_939093
atgctggtctatgctgcatttccaagaggcttaactgttctctctttggttggtctccgccagctggacatgtccttgctctgccaactgtacagcctctacgagtcgattcaggagtacaagggggcatgccaggcagcctccagcccagactgcacttacgctctggagaacggcttcttcgatgaagaggaggaatatttccaggagcagaactccctgcacgacaggagggaccgaggccctcctcgggacttgtcactgcctgtctcctccctctccagcagcgactggattctggagtccatctagagggtcttgggagggatgtgactgttgggaagcccttcctactggacacgctgtcatcatttgctgcttctcttgcaagaaagcacctccgttgtggacggtcctcgggcacaggggatgagcgctaccagtttcatttgtaggcagggagttctccgcggatgcatggtggcagtctgctttgatggcagcagtttctgcttaggtgacctagaggtcctcagcagtatcctccacacctatttattgaggtgcacctgctggggattcataatgagaatataacaagaggatctcggtgaaaggccttagtgggtgttttgtgtgaggtggcttgtagctagctacttccttacagatggtagagtattccaatcctctttgtgttagggttcttgcttccagtttgggatgtattaaaaccaccatttcactgcttcccttcctcaatatgctctgcagcttttcttgctgtttaaacctctcgcctcagctttatttatttgtaagctgcattactaactgcccagtgattcggtgaaagctttttactgaaaaagttaacatttctagtcatcccaatcaactggcttttttcaaccaaaattttatatcattctttgtctatcagatacgagaggaaggaagataatacgaagacatgttgaatagtgaaaaaaaaaaaaaaagaacacaaaaactggggcaagccaatgtgatgtatcactcactgtaagatggcaaatgttttcatttttaagattccgaatgtaaactagtgtgctagaaagcaaaccacccgccactcaaaccagtaattaccttaagccttaatatatttattaaaatactttatgagaacattacactttgtaggttaaaaatgaggataaaatgctaaactatctgtgtcatgtgttattttattctgaatttggaatcatcaactttcatgacttgaatgcattgagtccagtcaaataatgaaagaaaattagttt

SEQ ID NO: 7504 - DNA, 3157 bp, Homo Sapiens
  XM_939186
atggcgggcccggccccgcccgcggccgacgagctcccgggcccggccgccaggcgcctctactccaggggcatcatggccaaagagacctggctgctctggatggggctctgcccctcaccagccctccacgagcccagtgggatccagctgggttggaagggagccagccaggttggggaggcgagggccctctacaacatcgggaacgtgtaccacgccaaaggcaagcaactgtcctggaacgccgcaaacgccacgcaggaccccgggcacctgccgcccgatgtccgagagaccctgtgcaaggcctccgagttctacgagaggaacctgtccctggtgaaggagctgggcgaccgtgcggcgcagggcagggcctacggcaacctgggcaacacccactatttgttggggaacttcacagaggccacgaccttccacaaggagcgcctggccattgctaaggagtttggagacaaggcagccgagaggagggcctacagcaacctggggaacgcccacgtcttcctggggcgctttgacgtggccgccgagtactacaagaagacgctgcaactgtctcggcagctcagggaccaggcagtggaggcgcaggcctgctacagtctgggcaacacctacacgctgctgcaggactacgagcgcgcggccgagtaccacctgcggcacctgctcattgcccaggagctggccgacagagtgggcgagggccgggcgtgctggagcctgggaaatgcctacgtgtccatggggcgcccagcgcaggccctgaccttcgccaagaagcacctgcagatctcccaggagatcggggaccgccatggggagctcacggcccgcatgaacgtggcgcagctgcagctggtgctcggccgcctgaccagcccggcagcctcagagaagcctgacctggccggctatgaggcccagggggccagacccaagaggacgcagaggctgagcgcggagacctgggacctgctgagactccccctggagcgggagcagaatggagacagccaccattcaggggactggcgggggcccagcagggactcgctacccctccccgtgaggagcaggaagtaccaggaaggcccggacgctgagaggaggccccgggagggcagccactccccgctggacagcgccgacgtccgggtgcacgtgccacgcacgagcatcccgagggccccgtcttcggacgaggagtgcttctttgacctgttgaccaagttccagagcagccgcatggacgaccagcgttgtcccctggacgatggccaggccggggctgccgaggccacggccgcccccaccctggaggacaggatcgcccagccctcgatgacggcctcgccccagaccgaggaattcttcgacctcatcgccagctcccagagccgccggctggacgaccagcgggccagcgtgggcagcctgccggggctgcgaatcacccacagcaatgcagggcacctccgaggccacggcgagccccaggagccgggggacgacttcttcaacatgctcatcaagtaccagtcctccaggatcgatgaccagcgctgcccgccacctgacgtactgccccggggccctaccatgccggacgaggacttcttcagcctcattcagagggtgcaggctaagcgcatggacgagcagcgggtggacctcgccgggggcccggagcagggggcaggcggcccgcccgagccccagcagcagtgccagcctggtgcgagctaaggccctgtgcccaccgccaggcccaccctgcccccactcctggacgccggtctcacagtcacagccacgtcctcccgaggccattgccgaggacaggcactgggcatgcagccccacggcctccccgacccagggcgacaggctcaggccaagctgcccgtggtgggagggcgtgcttccatcccgggctggcccccatggccctcggcttcctcccttctgcccctgccgcaggccggacggggccttcggcatgtcggccccgacctggtgctgtcagactcccgcatcctctcccccaagcccttcccgttctgccctgccctgccaaatgtgaaaccctgctgtctcccccaccctccccaaaggtgtctctgagccgcctcttggggccaccaaggacagggccatgttctgtccccccagagctggtcttgggatggccgtgtgacaggcatgctccacccctccagcttcgtcctggggcagggctccctccaagcctgtctccccactccccggccagaggtcagcaaccacagaaggccccccagaccacgcatggcagaccaggctgcagtggcagccctgaggtgccccccgccgagtcccagggccctgcaggggcctcgacaggagccgggcctatctctaaagcagagggaatggctgggcatgaacttcgacattccaaaaccccaagccaggaaaaagggcagggcctggtcctagggatgcttactggcagcaagagcagtgcccagtcagggtgggaggtagcaccaggctctgtgaccctcacccaagtgggggggtggtcagtggaagctggggaggcttcactcagctcaaccctgcagaccccccatatgagaacccccctcctcccaccagctgggggagatgacatcactgctctctccatggggagggggctcacagggcaccaagttcgggatcctaggactggcaggacctgctggagcctgagatgggccccaggggcctgaggttgcctcctcctgtccagacccagccttggcacctcccaagactgccaagggccctaccatggccccacagcccccagggctggcagttccatctaggagggtgcctctaggccccactctcaggctaggatggagaggcagatctgggcctggtgaggtgacctgcttctggaggggcagggccgcacccgagagcagggacaggtgcccgaacacagggtctccaggacgtagcgcccccccgcatacttgaatgtatgtgcgtatttattgctcacgtctgtgccatgttgtcaatgggtcctttccaacccaagaggtacatttgtttttctgtttttcctgaaaaataaagtcggccaagtgag

SEQ ID NO: 7505 - DNA, 4021 bp, Homo Sapiens
  XM_939199
cggtggatggcttttgcggctgcgctgtcccccagccccgccagcggccccctcttcgccctcaaccgccggttacatcagccagcgacgagcagggttacctggcgattggtgatccccgcagagggacagagcacaggaaagggacccccacagtcacctgtgtttgaaggcgtctacaacaattccagaatgctgcatttccttacagctgttgtgggctccacttgtgatgtaaaggtgaaaaatggtaccacttatgagggtatcttcaagacgctaagctcaaagtttgaactagccgtggatgctgtgcaccggaaagcatctgagccagcaggtggccctcgtcgggaggacattgtggacaccatggtgtttaagccaagtgatgtcatgcttgttcacttccgaaatgttgacttcaactatgctactaaagacaagttcaccgattcagccattgccatgaactcgaaagtgaatggggaacacaaagagaaggtgcttcagcgctgggaggggggtgacagcaacagcgacgactatgacctcgagtctgacatgtccaatggatgggaccccaatgaaatgttcaagttcaatgaggagaactacggtgtgaagactacctatgatagcagtctttcttcttatacggtgcccttagaaaaggacaactcagaagagtttcgtcagcgagagctgcgtgcggcccagttggctcgagagattgaatcaagcccccagtaccgcctacggatcgccatggagaacgacgatgggcgcactgaagaggagaagcacagtgcagtccagcggcagggctcagggcgggagagccccagcttggcatccagggaggggaagtatatccctctgcctcaacgagtccgggaaggtccccggggaggagttcgatgcagcagctctcggggcggtcggcctggccttagctctttgccacctcgtggccctcaccatctggacaacagcagccctggcccaggttctgaggcccgtggtatcaatggaggcccttcccgcatgtccccaaaggcacagcggcctctgagaggtgccaagactctgtcttcgcccagtaataggccttctggagaaacttctgttccacctcctcctgcagtgggccggatgtatcccccgcgttctcccaagtctgctgcccctgccccaatctcagcttcctgtccagagcctcccatcggctcggcagtgccaacctcttcagcctccatccctgtgacctcatcagtctcagatcctggagtgggctccatttctccagcttctccaaagatctccctggcccccacagatgtaaaagaactctctaccaaggaacctgggagaactctggagccccaggagctggctcggatagctgggaaagtccctggtcttcagaatgaacagaaacgattccaactggaagaactgagaaagtttggggcccagtttaagcttcagcccagtagctcccctgagaacagcctggatccttttcctccccggatcttaaaggaggagcccaaaggaaaggagaaagaggttgatggtctgttgacttcagagcccatggggtctcccgtctcctccaagacagagtccgtatcggataaggaggacaaaccacccctggcaccatcaggaggcactgaggggccagagcagcccccaccaccttgtccaagccaaactggcagccccccggtgggcctcatcaagggagaagacaaagatgagggccctgttgctgaacaagtaaagaaatcaacgttgaaccctaatgctaaggagttcaatcctacaaagcctctgctgtctgtgaataaatccaccagtaccccaacttctccggggccccggactcattcaactccctccatcccggtgctgacagcaggccagagtgggctatacagcccccagtacatctcctacatacctcagatccacatgggaccagctgtgcaggcacctcagatgtatccatatcctgtatccaattcagtgcctgggcagcagggcaagtaccggggagcaaaaggctcccttcctccgcagcgctcggaccaacaccagccagcctcagccccgccgatgatgcaggccgccgcggctgctggcccgcctctggtggctgccacgccctattcttcctacatcccctacaaccctcagcagttcccaggccagccagccatgatgcagcccatggcccactacccctcacagccggtgtttgcccccatgcttcagagcaacccacgcatgctgacgtcgggcagccatccccaggccatcgtgtcatcctctacccctcagtacccttctgcagagcagcctaccccccaagccctttatgccactgttcaccagtcctacccacaccatgccacacagctccatgcccaccagccgcagccggctaccacgcctactggaagccagccgcagtcccagcatgcggcccccagtcctgtccagcatcaggcggggcaggccccacacttgggcagtggacagccacagcagaatctgtaccacccaggggccctgacaggcacgccgccctctctgccaccgggaccttctgcccagtcccctcagagcagcttcccccagccagccgctgtgtatgccatccaccaccagcagctgccccacggcttcaccaacatggcccatgttacccaggcccatgtccaaactggaatcacagcagccccgccccctcaccctggggctccccacccgccccaggtgatgctgctgcacccaccccagagtcatggggggcccccccaaggcgcggtgccccagagtggggtgcctgcactctcagcttccacaccctcaccctacccctacatcggacacccccaaggtgagcagcctggccaggcgcctggatttccaggaggagccgatgacaggattcgtgagttctcattagctgggggaatttggcatggaagagctgaggggctgcaggtggggcaggatgcacgggttctgggtggggagtgaggggtcttggaggcagggctgtcccacagggcgcccgccgacctgcacctgtctgtgaagtatgtagggtgggcagaagccacagtcgccgccgccaggggcttgctcctggctctgtcctttgcttccctccgtcctcgctcagttgtgatccagcagcccccctccccactgcctccccagctctcagtgaccccgactgtctcctgacttagccgaggtaaggtcagtgcagcagacagggccagactggggtgtggggggctgagctgggcacatgagtgagggctctggcttactgggaaacagcgattgacctgtgcttctgacagcccccgagacaccttgaggaggccgctccttcccagacacacccccacgcccccactggacggcattggaggaagggacagctgcttgggttctaatgctcctgctctcttctctttcccctccaaccagttcaatctcatccctcccagcagctccccttccaccccccggggaactgaagattgtcctggccgcgacctgagacctccatgagtggagggaagagtgatctatgtctcttcccccagcagctcggaccactcccagccccccatccccccgttccccaggggagctggggaattcctgccaagcaccttgaatgggaggggcctcacagagggcagggccagggtccagcaggggtggggggttcctgctctgcccctgcccgtccccacccagtcttgccctcccatcctctcatctattcccccgctggagacggaagatcttttattttctattatttataacttcagacttgggccccctgttctttctttcccattaacttgagtgacctgtgtgagagacagacagatgccccacgaggatggctggacaaggacttttactttttattacataaaaatattaaaaaataaataaaaaaaataaaattttaaactaa

SEQ ID NO: 7506 - DNA, 2514 bp, Homo Sapiens
  XM_939236
atctcaaaataataataataataataataatctacaatgtcatttcccatccaagcttgacttctacctttactttctgatgtggttttgccatgtccccacccaaatctcatcatgaattataatccccataatcctgatgtgttgagggaggggcctagggggaggtgatcagatcacgggggcagttatcctcatgctgttcttgtgatattcagtaagtcctcatgagatcttatagggttttgttttgttttgttttttaggatggagtcttgctctgttgtccaggcaggagtgccatggcacgatcttggctcactgcagtctctgcctcttgagttccagtaattctcctgcctcagcctcctgagtagctgggattacaggcatgcaccaccacacccagctaatttttgtatttttagtagagacaggatttcactacattagctaggctggtctcaaactcctgacctcagttgatccacctgccttggcctcccaaagtactagggttacaagtgtgagccaccatgcccagctgagatctgatggttttatacatgtttgacagttgctccttcacatgttgccactctctgtgcggccaccatgtaagtcggacctgcccttctgccatgattgtaagtttcctgaggcctccccagccatgtgaaactgagtcaattaaacctcttccctttaaaaattacccaacctcaggtatttctttatatcagtgtgaaaacagattgctatactttctgataatcatgcttaagcaattggggaattcagactacctgggatcaaaccagggccccacccttagcagtcatgtgaccttggggaggttacttaccttctccgtctcaacaacttctgtaaaatctgtaacatgagattgtttctgagggttaaatgagcatagcacagtggggacactgtcaggcacacactacttgccagatgtcaagtattcatctttattgaaataggactgtggtaagccactttatggctctcgattctgtatgagaaaatcatgcttagtgccttgttagtaaaagaaagaaaatctgaaagtccctgccatggaaggaagaaatagcggggagaaaagggagttggtaagtttcagcatttcagagcttggagggacaagttaggtttctattttatggagaaggaggtggaggcaggatgggtcctaaggtgtcattcaaaacacacagccataactctttattgagagtagagctagggccgcagggattgctgtggtcacgttgcggacaaaaatgaccactcgttggaagacaggagaggagtgtttatcaaagcagtcaacaattcaggtgtatctatattcagtcagcaaataaaagttgttcaacttggttgctaatgggacccactctactgaggctttgtatagaactcatagaggaagatggcttcaagcaatgaactaccctgtgctttcttaggactaaaatctcaggaagttggtgatgaatgaaaaccttagtcccactggcactgcacgaggggccaggagagcagcagcatcataagccacagggtggggcagccaaggcaggggcattctgagctgttggggaggggtggcaggcagggtggggcactgtgaggtgtcggggagggcattgtgaagtgtggggtggggcattctgtgccacatgcctgggctcccacctggggccagtgggcttcagtctgtaggtgactacagaaggaggaggagctccgtctgttctctcttcaggcagttgttgtgtctctcagcgcttgttgggttcacaacctattaaataagccagctggtcttcaccctcccagacaagtcaactcaggggaggcagcagggtgtgggccttgacccgcagccctagccggggccggggccggggccagggatggtgcccggggccgcgctgtgaggtgggcaggcgaggagcgggaagaccatctctgcaagtgcagcatagcctcggcctaggacagtgggagtgtgtggccaaagctgtgagcagaggcacaggtggtggcagacagtagaggcgccccatggggaacatactgacctgttgtgtgcaccctagcgtcagcctcgagtttgaccagcaacaggggtcggtgtgtccctctgaatctgagatctatgaggcaggagctggggacaggatggcaggagcgcccatggctgctgctgtgcagcctgctgaggtgaccgttgaagttggtgaggacctccacatgcaccacattcgtgaccaggagatgcctgaagctttggagtttaacctttctgccaatccagaggcaagcacaatattccagaggaactctcaaacagatgctttggagtttaacccttctgccaatccagaggcaagcacaatattccagaggaactctcaaacagatgttgtagaaataagaagaagcaactgtacaaaccatgtaagtaaacactcaaatagttaa

SEQ ID NO: 7507 - DNA, 1679 bp, Homo Sapiens
  XM_939319
atggcgagaagaagcgatcgccacactgccactctgctgcccagccaccaggatttctgcctggagccctttgccctgtccctgctgcctgagggcgctcgggcgcgctggcccctggggacgccgagggcggctgcgacgcgccgagaggccgcggctctcccacctgtcaccctggcccttctctgcttggatggtgtcttcctctcctcagccgagaatgacttcgtccaccggatccaggaggaactggaccgctttctgctgcagaagcagctgtcaaaggttcttcttttccccccactctccagtcgcctccggtacctgatccatagaacagcagagaattttgatctcttgagcagcttctccgttggggagggctggaagaggaggacggtcatctgtcaccaggacatcagggtacccagttcggatggcctctctggcccctgccgcgctcctgcctcctgccccagcaggtaccacggtcctcggcccatctccaaccaaggagcagctgcggttccccgaggtgcccgggctggccggtggtatcgtggacgcaagcctgaccagcctttgtatgtgccccgggtgctgcgcaggcaggaagaatgggggctgacctctacctcggtgctcaagagagaggccccagctggcagggacccagaagagcctggagatgttggtgctggagaccccaactctgatcagggactccctgtgctgatgactcagggaacagaggacctaaagggcccaggacaaaggtgtgagaatgagccactgctggaccctgttggccctgagcctctggggcctgagagtcagtcagggaagggagacatggtggagatggccacacggtttgggtccaccctgcagctagacctggaaaaggggaaggagagtctgttggagaagaggctggtggcagaggaggaagaggacgaagaggaggtggaagaggatggccccagcagctgctcggaggacgattacagtgagctgctgcaggagatcacagacaacctgacgaagaaggagattcagatagagaagatccatttggacacatcctccttcgtggaggagctgcctggagagaaggaccttgcccacgtggtagagatctatgactttgaaccagcgctcaagacggaggacctgctggcaacgttttctgagttccaagagaaggggttcaggattcagtgggtggatgatactcacgcactcggcatctttccctgcctggcctcagctgcggaagccctgacccgggagttctcggtgctcaagatccggcccctcacgcagggaaccaagcagtcaaagctcaaagccttgcagaggccaaaactcctgcgtctggtgaaggagaggccacagacaaatgcgactgtggcccggcggctggtggcccgggccctgggactccaacacaaaaagaaagagcggcctgctgtccggggtccgctgccgccctgaggcctggagacccaactggcctggatctgcgtcccgacgtagctggcgcccccaacaccataagccttcacagacgccagagcagccccgcaccaccctcgagcttcaccatggggtgtggtgggctttagtttagtcccagaaatggagaaaaaataaaaactcacgttgttctaatgtga

SEQ ID NO: 7508 - DNA, 2776 bp, Homo Sapiens
  XM_939368
aattccaggaccagagatctggccctggcctattttctcttgctgtgtacacacacgcacacatgctgggtggcaggatctcgcccgctggagggtggtggagcccagtagaattggggtgactgggcataaacctgctgagactgcttccttccctggttgtgagtgatgtgaatgcctgccttccccggtcagcacttagaagcccttgataggcagcatttggcgacttgtggggcaggtgtttgggataaatcctaccttcatcctaggacttatttctgcatcagccttttaactcaggcacttcaggtaacgtgatctatgtgtgttttgactgaatctcatctcctgtgtttccctgtgcagtctagggaagcatgtctccagtctttgtccctgtcttgtcccaaccattaattctcatgtcacagcttctcactgcatgtgacaagagccaggcctatctgctagggccctgcggctgaggtctgacctggaccctcatgcccgagtcggaagacccctctccagaagccattctgcatccttgtctgctctgcgtcacccgagaacacaggcttcgcagcctcgctttctgaaatggtgtgtgccgagtcagattgccgctcagagaaaatacaagcccgttttccctagctgtgccatttggtgctctgccaggctgccgtgcaagggaataccgacgagacgagctgcactgtctctgatttggagccctcaccggagcttgtctttaaaaatgagcaggaagctcatgtatgtttgcatttcagtgagccgggtcctgacctgccgccacccatcacggtcagcgtggtgcatcttaccgaggaggcgcaggcctggattcttttgagtggtgctactgcctaggaagtaacacgtggagaatttccatcttgggaccatgcacacagtgccttggggagtagattttgccctaatagcgatgaagaattttatcagtcagtggagttcctttttcagatcagggatgggaaagagccaaactgggtacctcccacgtgtgccccgtgaacagccctttgcagctgggctgtggggcttggctgctgccctgtcccatctggcagttaacgccttctccctgctctgccccccactccccaaaaccagttgcagcctcaacccacatggggatgtagaaagccgtaaagtccacgctactgttgaaaatgtttacatctccgctctcaacctgccttgggttcgtgttaaatggtgttaaattctgcaaatggaggggaaaaaaatcaaattctaaatttcaaagtagaatttaaagcaaatttgtaaaaaaattatcctaccaccccttttggtccacttaagatatgccacgctgaagcaaggtatttcctactggattttgctttcactggtgtttagaaaataaacttgatttctctaggagcactcctttggttagagggatgcaagaaggagaggtgaaggtggcgtgtggtggctcatgcctgtaatcccagcactttggggaggccgaggcaggcggatcacttgaggccagcagtttgagaccagcctggccaacatgatgaaaccccatctctactaaaaatacaaaaaattagctgggcatggtggcaggcacctgtaatcccagttacttgggaggctgaggcaggagaattgcttgaacccaggaggtggaggttgcagtgagctgagattgtgccactgcacttcagcctgggcgacagagtgactctgtcaaaaaggaaaggcaaaaaccggaccctggagctctgtgggccctgattgcaggcccctccctgtgtgatgagggatgagtcagcttggggagccacttggccagcctgcatgcctggtcatcaggaggttgagaaaagccttgaaagttgtgaagcactgagcagatacaagtgtttgttaattttgtagaaattaactttcccatctggcctttatctccaaagttggtattgttgctccacgcagactgcagtccggtttcttattgtgactttgacaatgcaaagtgcaaaataggaagaggcctccccaccccactatcccaccctggtgaccaattcagtgtaaccattgcacgtactcagtcattggtgtctttggagtgacatctgcagccagttagtgccacctgagtacagcactcgtacttttacatgatgtgtgtgtgagtagctcttctgtccaaaccatgatttgaggttcaactacctgtagatcaaagctttattttagaacgataaactgattttttccaaatgggtgaaatcttctccccatgactatgttttcttaactttgcattgaatctatttactgggttacattctatgtgtagtttgctttcttcatttttttttcttttaaaatgctcatgtcttattccaagcaccttcctccaaagtccccataaagctgcatctccaacacattgttatgccaataaggttttatttaactttatttaaggatgattgtgtctttgaatgacaaatgtactgctgcttcctacctgcaagacgcacaatgtatgtttcaagggtgagcaagtgttatttcttaaatttctcaaatgcctgtagtaactattgtttctgcctctcaattgttgccagctctttgaagaaggggagaattgtgtgtttttgtgtggggatgtttctgatatgctgctacagttgcaaaacactggagctagagaaaataaagtactgatctt

SEQ ID NO: 7509 - DNA, 6196 bp, Homo Sapiens
  XM_939427
ggctcgggggccgagacctagctgggcttggggcggggccgagacggagcgaggggtccagggtgtgggaaacggggagggatttgaggaggggatcggaatgtggctccagttcgggaggcgttacctgcggagggtttgaggaaggcccaggagcgagcccatggtcttccgacgcggggccaggggcgggccccaggatccggagcttcgggggggccgagtccgggtttggggcccgggaggcggggccagttaggtcgagggtccctgggatcgtcgggtcaggccttgggctaacgtaggcactctcgcagttcctccgccttcaggaaggtctttttagcaggggccttacgggtgcatgcttcggtcctggaggacttaggctagcctcctctccatcagcgccacccgtctggggcccgaaaggagggagctttccctctgtcccccagcctttggactgtcaccaaacaagccattcgttcaccaaatactttttaagcgcctaccatgtgcctgacaagggatatgtaacggtgagaaaaactaggtgtggtccaggcccttcagggactcaggggctcgtggaagaagtggatattgaagtacttatcacacaaaggaggataaaagtacgatagcgatatctaccacgaagctgttgttccacaccagaaccaaatgagcgcaagatctgacaaaaaaaaaaggttcatcttttattcttccaaacactttcatttaaatcaagaggatgggatgtggttattactgtgtttttagacagaatcaatggtttctggctctgagatgttgcatacaccctctcagtccctgtatcctgagatggagtcacctgagaatccacagcaagtcctaaccagggatgggtctgggtgattaaggaagattggcttcagaactgggccaggggcactgctttgcttttgctgttttgatcagctctctgcctgcaggagacgaggaagaccaatgggaacagcccagtaaaggcgccattccccattttacagctggggaaactgagttacagagcttttctgcactgagtcatcaggagcaaatgctagatcagatagggtctctctctctgccactcaggccagagtgcagttgacgcagagcaggggagccctgaaatggagcatagtgtgtccggaactggtgggttcttggtctcactgacttcaagaatgaagctgcggaccctcgagttctacagggcctggagctgatacgaaaaacctcccttctttccctaatggtccccagcttccccgttcactgaaggccctgcagtcaggaacagtcaggactttgcacccagttgttgtgggtgtttggccgacccttcctcttgtgtgattcatggacccgcagcattgcattacctgggaacttttggaactgaagactctcagggctcacccgggaggacctgctgggccagaatctgcattttaacaagatgcccagaaactcctagagggcagaggcatgcctgccatcttcatcattgcattaccatcacccaacactatcaggggacctgccctgataatcagagtcttcctctgtcgcccaggctggagggcagtggcatgatctcagctcactgaaacctccacctcccggattcaagcgatttccctgcctcagcctcctgagtagtgtgggactacaggcgtgtgcaccatgcccggctaattttttttttattttagtagaaacggggtttcaccatgttggccaggatggtctcaatctcctgacctcgtgacccgctcgcctcagcctccgaaagtgctgggattacaggtgtgggccactgcgcctggcctatatgaattttatatttacctgctcccttcaccaggagatcatgctgctgtgatatcgggttttcttaacagcataaggaagacttgcccccttgccctatcaaagagaatagttttggaagggagaagtggggccaaaaaagacgcagttttcatttgtattgggaaatgtgaaaataaaattgccaactgctttagttaaaaacaaaaaaaagaaaaggaaacaagatgtggggctgccatatgcaataccgtggattctacagatcttctactctggaggcaaatattatcttcgctgaagccagaccaacctgacacaaaggccttttggttttttaatgtgactgtgttttattttagaatgtgtaattcactttagaagggcaaagtacctgtctggggaagactatttaatttcctgcatttatttagaatgctggctgatgttattatgaagggaaacagctctaacaactgagtgtcccccacatagacacagctcatgagttcaaggggcaaaggaattgaacagcagcctcctaatagccggccttctttgtgatgcggaaataattatcagcatgtaaaagactatatatatattcaacaattctgacaccctgcaaaattcaaatctacaactgatttgcttcctgggctcctgaaaacaactttgtcaaaattgttcagaaatataatcagccaatcgttgccccttggggacgcaggataaagcaagtcagccatgaccaatgtggagtcggccgtgcacaatgacatgcagacttgcaggacatcgagtccctgctatggtccctccccagtcaggcccccattgcctgggctgcagccagaagcattcaggcacaagtgcattcaacaaatacttatttaattgtattggtggttagagggttgcgattgattaaggtacattaatggatccatgtcctccctgtatccaagactctgccatttgtctctgcagttcctcccactgaagaatcggagtatatttctccagtccctaatgttgggttttgaattgtgtctagctttggccactggaatattaatctgtatgaccaaaaacttggaaagtgtgaattcatttgtgctcgctcactcctgctatcaccatgagaacaagcctaggccaggctgctgcttccagcagaagataagagacaccaagagcaaagtcgagcttcccagacatgctcatgctagactgaccaatcctcagctgacccatagatccatgaaaataaatgattgttgtattaagccactgagatttggagtgacttgttatgcagcattttgtgacaacaactaactgatacaagggtcactgtcctttatctctgtagattttaaccaatttttaatagctagatggagatcatctagttgcctttatttataatgaatatgactgtagagctagtttggcctgacactaccagtaacctacccagaaattcagaaatactttcttctccaacccgccccaaccaacctattttttgtttgtttgtttttgggttctccctctttgcctaggctagagtacaagtgttacagtcagagctcactgtaacctcaaaatcctgggctcaaatgatcttgcccttcagcctcctatgtagctaagactacagacatgtgccaccatgcctggctaatttttttattctttgcagagagagggtctcactatattgcccaagttggtttcaaactcctggcctcaagcagtcctcctgcctcacccttccaaagtgctaggattataggcatgagccaccacacccagcctcttcttctttttaaatagaaaccttattttattctgacagtgggttgctttcttttttctttttttaagaaaaagttggcccagccctagggaataaattttgactgctctaaacagggttggccaactatagaccaagggccaaatctggccctctgactgtataaattaagttttactggaataaatccaggtccatcgatttatccattgtctacatatgcttttaggctacgatggcaccactgcgtcactacaacagaggttatctagaccaaaagcctaaaatattaccgtttgcctctttatggaaaaagtttgccattccctagtctaaggtttagattctgagcttatcattttagcctacccccacttaccagtgactggttcaaaacaagtctgtgattccattctgactgttctactgagggaattcccccttcttctcatgcagagttgatgagggtaagttgtattaataggacatatgcttaggttttctgaaaaatacttttatctagaaatgcataggaatatgctggtgcctgaatgtaccatctgggggcctggagattgactcacctgcctccagagctagtgctcacacttactactgagagacctgaggaaacgcctgcctacccaccaccagaacctgcatacgtcacctggagaactagagatcagactgccacacacaccacccaggagcccagaggtgcacctgcccacttggcccagtgctgccactgccagcaagcaaagaagccacctgggagcccagggattggcccacgcaaacaggctatcatcagtgtccacaaacactgcccatggtccctagtattgacacacctggtccaccagcactaccactgatgctgaaggacaagacttcctggcatccccatcctcagcaaagcctcaccacagcctccaataacaactacagtctggccaagtgtggtggctcacgcctgtaatcccagcactttgagaggccgaggcgggtagatcacgaggtcagaagttcgagagcagcctggtcaacatggtgaaaccccgtccctactaaaaatacaaaaattagctgcgcattgtagcacgtgcctatagtcccagctactcaggaggctgaggcaggagaattgcttgaacctgggaggcagaagttgcagtgagctgagattgtgccactgcactccagcctggtgacagagctagactccatctcaacaaccacaaaaaacatactgcagtctaagccacggaatgactcacaggcaccactcatgccaattacagctgaaggaatcatatgcagactataccactgtacccacccagaatcaaagccaaagtgagatatccaatgaacactgtagatacagctataagaaaaggtctttcccatataaaagccaatccataaaattggaagaaatgactgttatctcagaggcacagatagtcacataaggatgcaagaaatatgaaaaaggaaacataacatctccaaagaagcacaataattctccagcaacagatccaatgaaaagaaaatctatgaaatgcctgaaaaaaattcagaataatgttattaaagaaactcagggagatacaagagaacacagataatgaatacaaaaaaaaaaaaacaggaaaacaattcatgatctgaatgacaaattcaacagagatagacagcataacaaagaaccaaacacaaatcctggaagacaataaatcattgaaataaatacaaaagataattgacagttttaacaatagactagatcaagcaaaacaaagaatttctgaacctgaaggctagtcttttaaaataatccagtcagacaaaaagaaagaaaaaacaatgaagcaaggctacatgatatatgggacacatatgtgaccaaaaactgaaattctgggagttctggatggagatgagatgggtaaaggcataaaaaacctatttaatgaaataataactgaaaacttcctgaatgcttccaaatgcaggaagctcaaagattaccaaataaatacaactcaaaaaggtcttctccaaggcacattatggtaaaattgtcaaaagacaaagagaaaatgctaaaaacagcaagagaaagacatcaagtcacttataagagaatctccatcaggctaacgggatttctcagcagaaaccttacaggctaggagaaaaggggatgtatactacaagtaaaaaataaaaataaaaaaagtaagccaaaaatactatacccagcaaagctatccttcacaaatgaaggaggctggcacagtggctcacatctgcagttccagagactcagaaggctgaggcaggagaaccatttgatcccaggagttcaaggctgcagtgagctatgatcatgccactgtactccagcctgggtgacagagtgagactccattgctaaaaaaaatagtaataataaaagagaaaaaaggatttcccagataagcaaaa

SEQ ID NO: 7510 - DNA, 999 bp, Homo Sapiens
  XM_939593
atgtggtaccacagattgtcccacctacacagcaggcttcaggacttgctgaagggaggagtcatatatccggcccttccacagcccaacttcaaaagcttacttcctttagctgtccattggcaccatacagcctccaagtctctgacttgtgcttggcagcaacatgaagatcattttgagctgaaatatgctaataccgtgatgcgctttgattacgtctggcttcgagaccactgccgctcagcatcgtgctacaactctaagactcaccagcgcagcctggatactgccagtgtggatttatgtatcaagccaaagaccattcgtctggatgagaccacactctttttcacttggccagatggtcatgtgactaaatatgatttgaattggctggtgaaaaacagctatgaagggcagaaacaaaaagtcatccagcctagaatactatggaatgctgaaatctaccagcaagcccaagttccatcggtagattgccagagcttcttagaaaccaacgagggactgaagaagtttctgcaaaactttctgctctatggaattgcattcgtagaaaatgtccctcccactcaagagcacacagagaagttggcagaaaggatcagcttaatcagagaaaccatttatgggaggatgtggtatttcacttcagacttctccagaggtgacactgcgtacaccaagctagctctggatcggcacactgacactacctattttcaagagccctgtggcattcaagtgtttcattgtcttaaacatgaaggaactggtggcaggacactgctagtagatggattctatgcagcagaacaggtacttcaaaaggcacctgaggaatttgaactcctcagtaaagtgccattgaagcatgaatatattgaagatgttggagaatgtcacaaccacatgattgggattgggccagtcttaaatatctacccatggaataaagagctgtatttgatcaggtga

SEQ ID NO: 7511 - DNA, 3049 bp, Homo Sapiens
  XM_939682
atgccaagttatgcagctgttctggttcctcctgaatgtctggagttagaattgagagacttgaacgtggagatggaggtcaggctgcagtgcgatgggatcatctatggagcatatgaggagaagagaatctggaggaggaggagggggagccagcaggggagcagctgtgggttggaggaagccaggagggagagtgcaatgccgagaaagcaatgaagagcgtttcgaagcatgccagcagaacccaatgctgcaaagaggcctgggaatgggattgctgagggcccttctcacagtgagcccctcaagagcagcgtcaggggattgtggggactgttggcacacagctggctttgctaggttgaagacaatgggaggtgtggaagacttgttgactcatttaaagaagattggagggaaaggtaggattgagagtgtttcagacagaaaaaggattatatgctgagggtaaagcacaagtacagagggttgcagatagtgcagaagtctttaaaaacaattattttaacccaacttccagggagactgaatttcttctgccagtcagtaacaccatcaacctgggagttgcccctgacccctccagtcttagctcctgctcctgtaacaaaataccacaaactggttagcttatagagaacagatgtttatttcttacagttcaggagtctggaagtccaagatcatggtgccatcatggccgagttctggtgagggccctcttctgggatgcagcggccagcttctcatgttctcacagtgggtggagggtaagcttgctctctggcctcctcttaaaaaggcactaatcccattcatgagggctccaccttcatgacctaattacctcccaaagatgccatctccaaacaccatcattctggggattccatttcaacatgatttgggggatacatcagaccataacacttttctttttctcaaccttcacatccagttggttctcaagccctggcgattttacgcgctagataggtcttaagttcatctctacgcctgccctggttaaggttctcatcatttctcctctggattcatctgcaacacaggctgccgggttggttcccacctcctagagctggaagagtgggctctctgattctttacacccccgcctcaatcctcctgctgcctgaataaccatctccccgtgacctaggatatatcccagccccttagaggcatgcaaagccttccatgtctgaccctgcctcatgtcttggaagccctagactgctgctgtaccctgaaggaggtacctgctcacattggcccctctgtctggaataaccccaccccggttccacccaagtcaggaaagcttcccaacccctccctcccaccaccccaaagctaagtgaagtgacccctcttcttgcctctgtaacaccgccatgcacatttcatacagcccttgctgaaacttcatctagttctctgttagacttaacattccctaagggcaggtttggaaccttactcatctttatatggcgtctaaaatagtgcttgctttatgataggtgctcagtaaaggttgtcttgaattgagcagatcctctagggacaggagttggatggagagcagactgtaaagcctcatgagggcaggggccctgcctcttcctgagctcaggatacccagagcctagctcagtgcctgccatgaaattgttcactccatcaagccttgttaaatgagttcggggcggggggagcatgatggttttctctctctcagaaagaaagcgctgtatcaaagccctagcaccctctctacacccaccttcagtatttcatattagatgcggcccaagtgatactttctttaccgtcccgtgaagacagcatattggcagccctgcaaaaacaaaacaaaacaaaaccctcagttcatggcatacttgctataaatcagctatgtgtattgtcaaattgtagaactgaaagtatattctgattcggtgtgtgtataaggaaatatacaccagtatatgcattaaaacgtcaagaagagctgggcacagtgtcacatgcctgtaaacccagctattcaggaggctgaggtgggaggatcggttgaggccaggagtttgaggctgcagtgagctatgattgcacagctgcactccagcctgtgctgagacctcatctcttaaaaaataaaaaataaaaagtctaagaggatacacagaaatttttaagtggttacctccacggaatgggattaggggatcagaggtgagggaactcatggtttggctatttctcgttctttctgcactgtttcaaatttttacaagtgtatgttattgtacttttaaaaagattagcttggcaacaagtctagcctgaaatgggtgctattttgactagtctgagtgaaaagtgaggatttaaatgaagtaacccctaaactcagccagtcccatgtttttttaacacttggaatatctaattccatttacactgcattcttcaaatgtaattttcaaagatgccttttgcctcatcccttgcttttaagtattattatagacttttggagactcacgaaacaagcaatccctaaattctcgcccaggaaagtatcttggattaaatggtttttgagaaccttgagagtgtatattctatgaaatggaagaaacaagaactagacagagtcacaaatgctgttgatcacagacaatctctgccatccataaggtaaatgtaatacatctggcgacctgctgagtgtgaacttgcagcaggtgaggaaggaactctgaactctcacaatcttgtttcttcatttcccagagagaaactcggcaaagagaaaaaggacatttccctccaggttatctgaaagaatttcaatgcttacctttaatcatgtgacattgtttatcttggattaaaagaaaagaaaatgtatttattttgtgcatattttcaataaaatatataaaatcgagttggtatatagtgccaaataccattaattaaaaatatttta

SEQ ID NO: 7512 - DNA, 2010 bp, Homo Sapiens
  XM_939697
gtggctggccggcaggccaatggcggccaacgccacttccggccgccctccgagcatcgctcttcggcaacccgaagccacaggatggaggagggggatcccagcaaaggtagcgactaaggggacccaagcagaacgggagggcgacgtccggagcggcggcagagccaggggacgctgtgtgaggctggcaaagcggtgttcacctagttctctcgggctccgccgccgccggaggaggacaggaggccggcaaggcgacccccaaatcttcctaggctctgacttccgtctcctaacccccgcaaattccaacccggtcttggaaaatcccgcgagaacgggctcccgaattgtcattgggatctcgcgagaacgaaatcttcctttctgtgggcggagcaatcttcccgatgtctcttccctctgaggccagtagcaggaagggcctcgggagttgcgagtgtcgcgaggtttgaggtcgctcggtgggccgggcgctgtgcgaagctagaaataactgggggcatggagaatgcggtggctgtaaagggccgctgaggcggtggaggcctggcagagagcgtccccgcggtcgcggcttctggcttctctgtggagcttggttcttccgtggtggtgcagcaccccaggaacttcaggaaccagtccttccttggagagctccccgggacagccacgggggccaagtgaaactagcgcgttttcttggatcctacactttatagtgagtcataaatactttaaatacaaagccaacaacatttgctgcaaataaacgtaaaaatactgttaaagtgtaaagtgttttcctccgtaccatctgacgtttctggcggttcgttgaacgcgagagaacgctgagccgtctgcactgagcccgggagcatcttcagggcagcgccgcccacgcgcgaggtgaatgaaggacacggcctcttgacactcccaggcagcacagatagacggatcctctaccgctgattgcagctggaaaagattctgagggctcacctgagtaatccaggatcatcttcccatttccaggtctctgcccttgatcacatcagcagaatccttttgccattggctagaagtgaccccaggatttttttattatcaagagagactagaagaatcatgagacttttcctagttgcctttcaagaatatgaagaaaaaaatggttctcaaagtgggtttgaatgagtattgttccaataaatgaacttatattcatatttcatcccctgagtcctggtgtttcaacatccattagaactgaataatcatactgcatatcaaagtttgtgggaaattgctaaagtgtaaaaaatgctcatattgaaaaagaagaaaagctgaaaattaattgtgcttccaactttaaaaaaggacaacaagctaatcctaaagaaactagaataaaaggaaaaaataaacagaagttaaagagtaattttaaaaaatacaatagaaattatcaacgaagccaaaagttgattctttgaaaagattaatgaagtaggcaaaccactggtgagatgaatcaagaaaaatagagaaaagactcaaataaacattaggaatggaaaatagggcaatgctaaagagaattcaaagatcagaaaaatatgggagtatactaaaaacgatttcatgcccaagtgttcaaatctatattgcctttaaaaatatataaaaaaggagccggacactggctcatgcctataatcccagcactttggaaggctgaggtgggtgaatcacaaggtcaagagatcaagaccatcctggctaacacagggaaaacccgtctctactaaaaatacaaaaaattagctgggcgtggtggcacacgcttatagtcccagctgctcaggaggctgaggcaggagaattgcttgaacccatgaggcagaggttgcagcgagcggagatggccccactggactccagccttggcgacagagagagactccatctcaa

SEQ ID NO: 7513 - DNA, 2389 bp, Homo Sapiens
  XM_939698
atgccggaagctttcctgccacgcaagctttccgagcatgctaactcgccccaagcagctcccatcccgcagcatccactgcagccgctgaggagagtggcgcagcgcagaaaccagtgcccagtgcccaggtgggggaagcggtccgtgggagtcacagccgcgccacccgccgccgctacccccttcaaggtctcgctgcagcccccgggagccgccggcgccgcgcccgagcccgagaccggtgagtgccagcccgccgcggccgccgagcaccgggaagccgccgctgtccccgccgccaagatgcccgccttctcctcctgcttcgaggtggtgtccggggccgccgcgcccgcctccgccgccgccggcccgcccggcgcgtcctgcaagccgccgctgccgccgcactacacgtccaccgcacagatcaccgtgcgggccctgggcgccgacaggctcctgctgcacgggcccgatcccgttcccggcgccgcgggctccgccgctgccccgcgcggccgctgcctcctgctcgccccggcgcccgcagccccggtcccgcgcggcggggctcctcggcctggctcctggaggagctgctgcggcccgactgccccgagcccgcgggcttggacgcgacacgggaggggcccgatcggaacttccgactgagcgagcaccgccaggccctggccgccgccaagcaccgaggccccgcggcgaccccggggagccccgatcccggccccggtccgtggggcgaagagcacttggcggagaggggccccaggggctgggagaggggcggcgatcgctgcgacgcgcccggtggggacgcggcgcggaggcccgacccagaggccgaggcaccccccgccgggagcatcgaggccgccccgagtagtgcggcggagccggtgatcgtctccaggtcggatcccagagacgagaagctggccctatacctggccgaggtggagaagcaggacaagtatctgcggcagaggaataagtaccgattccacatcattccagacggcaactgcctctaccgagctgtcagcaagacggtgtatggggaccagagcctgcaccgggagttgagggagcagacggtgcactacatcgccgaccatctcgaccacttcagccccctgattgagggcgacgtgggggagtttatcatcgctgctgcccaagacggggcatgggccgggtacccggagttgctggccatggggcagatgctgaatgtgaatatccatttaactactggagggaggctggagagtcccacggtgtctaccatgattcattatttgggcccagaggattccctgaggcctagtatttggctcagttggctcagtaacggacactatgatgctgtatttgatcactcctatcctaacccagagtacgacaactggtgcaaacaaactcaagtgcaaaggaaacgcgacgaagaacttgccaaatctatggccatatccttgtctaaaatgtatattgaacaaaatgcatgctcttgaaatgtctcaaaaccttacaccctgggaataattgcatatataacttgtgtttggagaatcacatgaactttaatcagggtaatagcactttcaaacttgctagtagattttactgtaggtgtaatgccttaatcatctttttgaatgttttctcagagctggaggttgctgggcacctaaatgatgtttcatgatagctttgggtgattttactgctatttataatttgctgtataaagtgagcattacttaatttgcaagctgatttctcacagtgtaaatttgttcattcctggtagtctattttctataaaaatgtatttttgcacaacatttttaaaaactggtgtaccttcatctatgacgtgttccattttgacaaacagctttcaggcgtaaatccagagaagtgctttatatgaaatgtattattttgaacagagtttgtgatttggtagttattttatgttgttgaaatttgaatttcacaattcttagataattatttcaaatggatattgatgcattcttgttaccagatgtttggcccattccattttgatgaaacagagctgttgttttggaagtcattatttttctagaaatggcgaatcttttaaagaaaattacttaatggaaggttgtgggaaggtgtttttttgtgttttttttttggtttttgttttgtttttcctcttttaagggatagtagcaggtcttacttgaatgaaagtctgatatttgctgatggcagaatgattattctgtaccctggttgatgtgtagagtagattgtctggtgctctcagttgtttttatttacatttgtcacgttgtttcaggatggtctc

SEQ ID NO: 7514 - DNA, 1051 bp, Homo Sapiens
  XM_939738
gccgaggcgggggtccatacggcgctgttctggattcccgttgtaacttaaagggaaactttcacaatgtccggagcccttgatgtcctgcaaatgagggaggaggatgtccttaagttccttgcagcaggaacccacttaggtggcaccaatcttgacttccagatggaacagtacatctatgaaaggaaaagtgatggcatctatatcataaatctgaagaggacctgggagaagcttctgctggcagctcatgctattgttgccattgaaaaccctgctgatgtcagtgttatatcctccaggaatactggccagacggctgtgctgaagtttgctgctgccactggagccactccaattgctgggcgcttcactcctggaaccttcactaaccagatccaggcagccttccgggagccacggcttcttgtggttactgaccccagggctgaccaccagcctctcacggaggcatcttatgttaacctacctaccattgcgctgtgtaacacagattctcctctgcgctatgtggacattgccatcccatgcaacaacaagggagcttactcagtgggtttgatgtggtggatgctggctcgggaagttctgtgcatgcttggcaccatttcctgtgaacacccatgggaggtcatgcctgatctgtacttctacagagatcctgaagagattgaaaaagaagagcaggctgctgctgaaaaggcagtgaccaaggaggaatttcagggtgaatggactgctccagctcctgagttcactgctattcagcctgaggttgcagactggtctgaaggtgtacaggtgccctctgtgcctattcagcaattccctactgaagactggagctctcagcctgccatggaagactggtctgcagctcccactgctcaggccactgaatgggtaggagcaaccactgactggtcttaagctgttcttgcataggctcttaagcagcatggaaaaatggttgatggaaaataagcatcagtttctaaaaaaaaaaaaagaataatttgacttcttc

SEQ ID NO: 7515 - DNA, 430 bp, Homo Sapiens
  XM_939844
atgaagtgtctaccttctgcagactccaatggctcaggaactgggaatgcagtgccaggctcgtggtatcctgcagcagatgtggggagttttccttctttatgtttccatgaagatgggaggcactacaggacaaaacattgaccagcccactgagatgacagctacggaaggtgccattgtccagatcaactgcacgtaccagacatctgggttcaacgggctgttctggtaccagcaacatgctggcgaagcacccacatttctgtcttacaatgttctggatggtttggaggagaaaggtcgtttttcttcattccttagtcggtctaaagggtacagttacctccttttgaaggagctccagatgaaagactctgcctcttacctctgtgctgtgagagacacggtgactatgaggcctctttag

SEQ ID NO: 7516 - DNA, 351 bp, Homo Sapiens
  XM_939880
atggcctctgcacccatctcgatgcttgcgatgctcttcacattgagtgggctgagagctcagtcagtggctcagccggaagatcaggtcaacgttgctgaagggaatcctctgactgtgaaatgcacctattcagtctctggaaacccttatcttttttggtatgttcaataccccaaccgaggcctccagttccttctgaaatacatcacaggggataacctggttaaaggcagctatggctttgaagctgaatttaacaagagccaaacctccttccacctgaagaaaccatctgcccttgtgagcgactccgctttgtacttctgtgctgtgagagacacacactga

SEQ ID NO: 7517 - DNA, 582 bp, Homo Sapiens
  XM_939885
agcaaaagagcctagaacctgggtcctagtttgcacctagaatatgaggcaagtggcgagagtgatcgtgttcctgaccctgagtactttgagccttgctaagaccacccagcccatctccatggactcatatgaaggacaagaagtgaacataacctgtagccacaacaacattgctacaaatgattatatcacgtggtaccaacagtttcccagccaaggaccacgatttattattcaaggatacaagacaaaagttacaaacgaagtggcctccctgtttatccctgccgacagaaagtccagcactctgagcctgccccgggtttccctgagcgacactgctgtgtactactgcctcgtgggtgacacacagtgagacagatgggcctgcacctgtgccgttttcctctgtggggtgggagtcacagcctagaaagaagtccaaaagtgctttctaaaatttttattttcaaaaggtattagcaaatttatgtattcttctactatttgcaaaatcaatcttatttattttttaaataggtatttcacttatgtgatctaaaattaaaaaagtataaa

SEQ ID NO: 7518 - DNA, 1574 bp, Homo Sapiens
  XM_939887
atgccgattactgatccagtagatgatgacggctcattctcagcagtcacagtccatcacgtagagtcatatttagggactacattcaaagaagaattggatgcagctatgaatgcaaggccacacaaggtggatggaagagttgtggaaccaaagagagccgtctcaagagaagattctcaaagaccaggtgcccacttaactgtgaaaaagatatttgttggtggcattaaagaagacactgaagaacatcacctaagagattattttgaacagtatggaaaaattgaagtgattgaaatcatgagtgaccgaggcagtggcaagaaaaggggctttgcctttgtaacctttgacgaccatgactccgtggataagattgtcattcagaaataccatactgtgaatggccacaactgtgaagttacaaaagccctgtcaaagcaagagatggctagtgcttcatccagccaaagaggtcgaagtggttctggaaactttggtggtggtcgtggaggtggtttcagtgggaacgacaactttggtcatggaggaaacttcagtggtcatggtggctttggtggcagccatggtggtggtggatatggtggcaatggggatggctataatggatttggtaatgatggaagcaattttggaggtggtggaagctacaaggattttggcaattacaacaatcagtcttcaaattttggacccatgaagggaggaaattttggaggcagaagctctggcccccatggtggtggaggccagtactttgcaaaaccacgaaaccaaggtggctatggcggttccagcagcagcagtagctatggcagtggcagaagattttaattaggaaacaaagctcagcaggagaggagagccagagaagtaacagggaagctacaggttacaacagatttgtgaactcagccaagcacagtggtggcagggcctagctgctacaaagaagacatgttttagacaaatactcatgtgtatgggcaaaaaactcgaggactgtatttgtgactaattgtataacaggttattttagtttctgttctgtggaaagtgtaaagcattccaacaaagggttttaatgtagatttttttttgcacccatgctgttgattgctaaatgtaatagtctgatcgtgacactgaataaatgtctttttttttaatgtgctgtgtaaagttagtctactctgaagccatcttggtaaatttccccaacagtgtgaagttagaattccttcagggtgatgccaggttctatttggaatttatatacaacctgcttgggtgaagaagccattgtcttcggaaaccttggtgtagttgaactgatagttactgttgtgacctgaagttcaccattaaaagggattatccaagcaaaatcatggaattattggttataaaagtgattgttggtacatcctatgcaatatatctaaattgaataatggtaccagataaaattatagatgggaatgaagcttgtgtatcatccattatcgtatgtaatcaataaacgatttaattctcttgaaaaaaaaaaa

SEQ ID NO: 7519 - DNA, 348 bp, Homo Sapiens
  XM_939906
atggagtcattcctgggaggtgttttgctgattttgtggcttcaagtggactgggtgaagagccaaaagatagaacagaattccgaggccctgaacattcaggagggtaaaacggccaccctgacctgcaactatacaaactattctccagcatacttacagtggtaccgacaagatccaggaagaggccctgttttcttgctactcatacgtgaaaatgagaaagaaaaaaggaaagaaagactgaaggtcacctttgataccacccttaaacagagtttgtttcatatcacagcctcccagcctgcagactcagctacctacctctgtgctctagacacacagtag

SEQ ID NO: 7520 - DNA, 940 bp, Homo Sapiens
  XM_939919
gatgtgtgactttggcatcagtggctactgggtggactctgtggccaagacaatggatgccggctgcaagccctacatggcccctgagaggatcaacccagagctgaaccagaagggctacaatgtcaagtctgacgtctggagcctgggcatcaccatgattgagatggccatcctgcggttcccttatgagtcctgggggaccccgttccagcagctgaagcaggtggtggaggagccgtcaccccagctcccagctgaccatttctcccccgagtttgtggacttcactgctcagtgcctgaggaagaaccccgcagagcgtatgagctacctggagctcatggagcaccccttcttcaccttgcacaaaaccaagaagacggacattgctgccttcatgaaggagatcctgggagaagactcataggggccgggccttggaccccactctggccctccagagccccacatccccatctgggggggcagtgctcacccacaccataagctactgccatcctggcccagggcatctgggaggaactgagggggctgctcccacctggctctgtggtgagccatttgtcccaagtgccaaagaagcagaccatcggggctcccagccaggcccttctcggccccaccagcacctctccctgctgctccaaggacccgtctccagctgctgagatcctggactgagggggcctgaatgccccctgtggatgctgctgcccctgcacagcgggccgcccatacctgggtggatgggccaccgccttgcccagcctggatgccatccaagttgtatatttttttaatctctcgactgaatggactttgcacactttggcccagggtggccacacctctatcccggctttggtgcggggtacacaagaggggatgagttgtgtgaatacctcaagactcccat

SEQ ID NO: 7521 - DNA, 318 bp, Homo Sapiens
  XM_939934
atgagggggaatggcaaaaaccaagtggagcagagtcctcagtccctgatcatcctggagggaaagaactgcactcttcaatgcaattatacagtgagccccttcagcaacttaaggtggtataagcaagatactgggagaggtcctgtttccctgacaatcatgactttcagtgagaacacaaagtcgaacggaagatatacagcaactctggatgcagacacaaagcaaagctctctgcacatcacagcctcccagctcagcgattcagcctcctacatctgtgtggtgagcgcactgtgctccacaggcacttga

SEQ ID NO: 7522 - DNA, 539 bp, Homo Sapiens
  XM_939954
cgcctctgccgtgggcctgcgagaatcgaggcactcgctggcgtacccatgtatcgaaatgagttcacggcctggtaccggcggatgtcggtggtctacgggatcggcacctggtctgtgttgggctcactgctttactatagccggacaatggcgaagtcgtcagaccaaaaggatggctcagcaagtgaagtacccagtgaactctctgaacgcccaaaaggattttatgtggaaacagttgtcacatataaagaagattttgttccaaatacagaaaagatcctcaactattggaaatcatggactggtggccctggtacagaaccatgactggctgctgaattctgaaaaccaggacttggttcaacatttaaatttgatagttgccctgattcccattttgggtttgtgaaaagtgtatgtatttaaatttgctgtaaaacataatcactaataatatgcaataaatattttcttgaaggaaactatctgcgttttcttttttttttttttttttgagacggagtcttgctgtg

SEQ ID NO: 7523 - DNA, 1005 bp, Homo Sapiens
  XM_939987
atgaagtgcatcttggtggccattgagggcacagaggccctcttctactggacggatgaggagtttgaagagagtctccagctgaagttcgggcagtcagagaatgaggaagaagagctccctgccctacaggaccagctcagccccctcctagccccggtcatcatctcctccatgacgatgctggagaagctctcggacacctacacctgcttctccatggaaaacagcaactccctgtatgtccttcacctgtttggagaatgcctgttcattgccatcaatggcgaccacaccaagagcgagggggacctgcagcggaagctgtacatgctcgaggcatttctcaaatgcacaaacattaccagctttctcgtggtctctcccgccctctctggctctgccctcaggctgcggcccccagacctggggcagcgtgtccagctgtgggagcactttcagagcctgctgtggacctatagccgcctgcgggagcaggaacagtgcttcgccatggaggtgattactgggcgcaggagtccgcaggacttggagctgtcagaaatctttgaagacagttccttcaaccctcccctcctcctcccacaaaattatattgaggtggaacaggaggggaaagcagtggagaagaacacagcgctaaagtgccaatcacacctctcgcgtctcggcgcctcggaggctaatgaggacgcctggcgaaacgcagtaacggatttccgggtggaccttcgctttacggctcgtgagttcttccgcccaacccagaggaagcgggagagcagtttacgacagcgccggtcgtgtttacggcggcgcccgctgcgcgcgcatgtttcctcttttcctggtttctcaagagtgctgctgctaacgcggtccccggcacgcaccatctgttgccatcccggccggccgaggccattgcaggtgagcggcgtgtttcataggttcctgcggccctccggagccggttcggactag

SEQ ID NO: 7524 - DNA, 4971 bp, Homo Sapiens
  XM_940036
atgcattcttctagcatctttaacacctataaagagcgagtcagaagaacaagtagaggtgtgattgcctatatcagttcttccagctcagcctcaagccctgcctcttgtcacagtgagggttctgagaatagtttccagtcctcctcctcttctgttccatcttctccaaatagctctaattctgataccaatggtaatcccaagaatggtgatctcgccaatattgaaggcatcttgaagaatgatcgaatagattgttctatgaaaacaagcaaatcgagtgcacctgggatgacaaaaagtcatagtggtgtgacaaaatttagtggcatggttctactgtgtaaagtctgtggggatgtggcgtcaggattccactatggagttcatgcttgcgaaggctgtaagggtttctttcggagaagtattcaacaaaacatccagtacaagaagtgcctgaagaatgaaaactgttctataatgagaatgaataggaacagatgtcagcaatgtcgcttcaaaaagtgtctgtctgttggaatgtcaagagatgctgttcggtttggtcgtattcctaagcgtgaaaaacagaggatgctaattgaaatgcaaagtgcaatgaagaccatgatgaacagccagttcagtggtcacttgcaaaatgacacattagtagaacatcatgaacagacagccttgccagcccaggaacagctgcgacccaagccccaactggagcaagaaaacatcaaaagctcttctcctccatcttctgattttgcaaaggaagaagtgattggcatggtgaccagagctcacaaggatacctttatgtataatcaagagcagcaagaaaactcagctgagagcatgcagccccagagaggagaacggattcccaagaacatggagcaatataatttaaatcatgatcattgcggcaatgggcttagcagccattttccctgtagtgagagccagcagcatctcaatggacagttcaaagggaggaatataatgcattacccaaatggtcatgccatttgtattgcaaatggacattgtatgaacttctccaatgcttatactcaaagagtatgtgatagagttccgatagatggattttctcagaatgagaacaagaatagttacctgtgcaacactggaggaagaatgcatctggtttgtccaatgagtaagtctccatatgtggatcctcataaatcaggacatgaaatctgggaagaattttcgatgagcttcactccagcagtgaaagaagtggtggaatttgcaaagcgtattcctgggttcagagatctctctcagcatgaccaggtcaaccttttaaaggctgggacttttgaggttttaatggtacggttcgcatcattatttgatgcaaaggaacgtactgtcacctttttaagtggaaagaaatatagtgtggatgatttacactcaatgggagcaggggatctgctaaactctatgtttgaatttagtgagaagctaaatgccctccaacttagtgatgaagagatgagtttgtttacagctgttgtcctggtatctgcagatcgatctggaatagaaaacgtcaactctgtggaggctttgcaggaaactctcattcgtgcactaaggaccttaataatgaaaaaccatccaaatgaggcctctatttttacaaaactgcttctaaagttgccagatcttcgatctttaaacaacatgcactctgaggagctcttggcctttaaagttcacccttaaggcctttgtttatttaaacatgaactgatggtaactgtacattttgtgctaaaatgcatatttatatgtgtataccatatgtggagatagaaaagacctttaagacaataaaagattgtaggctatctctgtaatcatgcaatagctgttcggattgagaactcttcagccatgattagacgttgactgcatctccctgatagaccaatcagctgtgtcgcacttaaactggagaagttacactgaagtataatcacactgaatgttagactttttcatctgccaaaaccaaaaaccattttgatctccctgtggttatcaatataacgcacaatcacaagtgtatgaggacttagaaattaatcctttgtggtaggagttctgttgaatgatggaaatcttattactaccacaagcctatttgatctggtaattggagacttcgggatttaggagatctccatgtctgtatttactctaccactgctaaagtgtgtggtcctgggtagtttacttgcttgcggaaaatgagaattgatggtgtccccaatgccccacctcacagagttactaaaaaatgtctgtaaagcatatttacctcttgggagataggcactatgtaaataaggtaaaatttctgttattacaattattcataataatattcttttcttatttctaagcctttctgggaaatcatttcagtccacaccaaccatattattcagggttcctgccatatgtgtggggtatcctactgatacacacgtattcaaagtttatgggtacaacaaagacatagtacatgtacataatatgtatgtgaatatagttaaatatatttcttcacaatattttaaactgtgaagaactttatcatacaggaaacttaaaacaagaggtgtcaaaagacccaaattaggtgcattttacttgtttatgatggcataaccattgctttaaaatgtttagacagtagaatattgaatttatgctctatttttgtttatttaagcaacacttaatgtaaaagtgcaacaggcaattgaatccaaatttcaacgacaaaaaaaaaaacatgtattttagagttcatctttggcaaaatctttggttcagggtactagttgtttaaaagttgattcatattcttaccttgtgctgagaaaggttgcattgctgccccttatacacatgctgcagcttgatgttaaagaatttttattctttctgaagaactaattaatgtttaaagcaactgtttaatatgatggcatgtgtgtgtgtgcgtgcgtgtgtatgttctgagtccacttcttttttcctaaataacactacagggattttgtcatattagatttaatttataatttgaaaaatcatctagtgtgtgacctacaggcttagaaatggtatagtcaaagacattttatccacatttctaatagtggacttgattaagtagataagatcagcatctgtttatggtagtaggagaaatagccaaagttgaggattttatgtatgttttcctgtttacctggaaaatagcaattaattggattttttggtaaagattgccttctgtataatgtttggattatataaaattgcaaaaatgataacagcccgctttactgtactaagcctgttactttcatgacgtgtgagcagaatgccttattttgtaatcttgtttaacttgttgctactgggacttgatttactgtggcactagttaagtaagttaaaaaaaagttaaaccctctcattattaaagaggaaaggcgatggtgatgtctgtagtacaatataaaccataattgtgatttaccttaagtaggtataactcttatgggatatacagtatagtttttgtgaatctttacatgatagcattatctttttataattttttttcctaagataaacaaatgcatagttttcttctatgggtgatagaaacagctttttgaagtaatgaaaacctcaaaagatcatgttgattcttaatttttgccttttgcataagcctctttataacatgtatctttaaaacaattaagtctttaggaatgtgtaaccagaactatgttagtattgcttataaaactttagttaggttcaatatatacatatatacatctctatataggtatatagatttgcattttgtcttgtaaaattttatttgaataaattcttcctgtaggtaatgggaaacaaaattaatagttcatatgtcactcatagcatttctatatttgaaagtagcccaatataaaacttttgattctaaaattaaaccagcagcctattacaagcacattctttgattgagtcattggttataaacttactaaatgcagagaaagcagccaatttaggaaacttctgagttggtgggacactgttgattaataatgtactgtatgaattaagtgatgctttaactttgattttacattttaaagttaaaatgtgggcattatgtcagcaaacttaagggcattatgtcagcaagctaaaacattttttttcctgtgcttttaatgtatctctttacatgatctgagagaggattcaagttgatagaaatagctgaggggaaaagggggaacatcttgggatgaagcttgtccttatggtgatggtttaattacagattaaaaaattagaaggaaatttcagtggattaagtgtatagctttcatatctacatttcaagaaattaccattgtaacttgataagagatgatttattttatgtaaacatctttgcaaagcaaggtgtagcagctcagctagatttattactgtgcacgaaagtaaatacctatctcaattattctttttcttttccaatataaagtttgctgaatgtacaagaagagtttatcacttaggatatagaatttttttaggggttgggggaggggatctgttaggaaactgttacctataaacaaagattgactggattcgatccaaaagataaaacttgaagctattctggaactaacatggaaaaatgaaatggctattgtttaaaaaaatgatagaaatacattgttgatgggatatgagttaagtttattttctacaaactgtaattgatgaggacatggataatatcttcatgtttctgagaagtaatctgtatgtggggggaggggataataaatatttcta

SEQ ID NO: 7525 - DNA, 429 bp, Homo Sapiens
  XM_940072
atggagaggaaagcatcatcatggtcattctctgtctcactgtccagcagggactcccctgaggggcccagggctcctcctccatggtgggagatgagcttttaccaggttccaccacccccaaagtgtgtggggttgcgggccctgggctttcagggcaggtggctccagggggccgcccagggtcaacactccctgtcccacctggtggatgctcgtgagcaacagctgccaacttggcaggttgttttctctggttggaggccactgagtgactggcaggttgctgggcctcgtgtggctgcagggagggttcaggaaggggatggagtaccaggggaacatggccacagagtgaccttccacattgctccacacgaacatgctgacgccacgggaggcctcactgaacgcaggcctgggggctga

SEQ ID NO: 7526 - DNA, 4902 bp, Homo Sapiens
  XM_940123
ctcactgttttcactgtgaaaattagaagttattaatgacctcttagatcatttctcaaaccatgaacttgtatagacattctgcttatgtagttaaaggaggttggcatatgtactatttgtgcaaaaccaccctttttctttgctacttctgtatgaactttatccgtatccactaatttgccttttgatgtatcaaatttgtggcttagatgttccaagaagcagaactgattttattataaatctccagcatctcttattaccccagaattgataccaaatatgttactccatcaaattatttttatcctagctccaacataaggattacctaaaattccttcccttatagaaatacttgtgaattatgttttcagttccatagatgctgatttttatgaagatttttgcaagcacggcaaaaggggttttattcttttttgcaagtttattttcatttgggtgagcttggaattacaagtaaatcaggaacacaagcagttctaacataaaacaataattactacgtattttttatgtggagcattcagctctgagtgtcacagtgacagcgtatcaaaaggacacccggcagcagtctttgacattgaggcttacaattagacttaaaaaataataaataggttgccaaatgagcatatcaaacaaaaaattcattccgaaatacaagtcctttaatcacagagtactatgatatgtattatcctttgcattaaaacctagtgccaaaatcctgtttgcattagacactcaagtgtgactgggtgcatttcttcttcccagtaaagtttccatccagactaaaataaaaacttggctctatattataaagattttggctctgtgcattttaggttcatgtattttctatttccagttattaatggccatttacccatactgttggctcttgttgtataattaaagtttagaatgatcattaaaaatccaatgatattttagtttgaattctgtttaatgtttcaaactatagtttgaaatttgtgatttttaaaaattttgtgtcatctgaaagatagttttttaaaatctcactaaaataaaatgttcatataacttctggctttactaaaccttagaatatccaatattgctcaactccatatgaatgacagcagttatgcatcaaattacagaacctcatgaaataagcacatatgtacacatacacgtgagttaattcccacttcaaacaaacaaagcatttaactcttttggtaaacacattgttttggttttggttttagagattctgcaaaagttcttagtcatttggaatttttaagcataaaagtactaaataatattaagcaggaattttttaggtgttgctttttagctcctttttatcagttctgggaagcaaacagtgctgcatctcctttgctctcatagaattctgtaatttttataccacaggtctctgctaaaaggcggcatgtgtttagaaattctaaaaatgagggctctgaactttgtaactgtcctgatacgttttcccttttttaatcccaaccccctggccaaatctgtccttagagatcattgataccttgtattgaaccctagggcgtaagtaattccgttgagaggcttttatacactgaaagccttacgcgtgtgttggttatcttcaggctctgactcagctgagtgtgcatctcacttcgcacattcatgttgtgtcttaatgacacacaaactatttttgaccatgacctgtattgtcacacagtgtgtttcttactgttgacttacagtagacttgctgaggcctgtgatgctgtgctttaaaagccaaaaactttgcaaaatgagggagaaatgtctataataaatgtattatatatacacaaatgtttataataaattttctttttacaactcatagcaagttaaatgttcccagtgggttcactgctccctaggagtgagttcaccattccctagtattttggttatattttctggctactaagatttcagcttctgtggatttttgctttaggtcagcaaaacagcattcactaaattatccactattataatgtgctgagaaaaaactaacccatggaaaattaaggtaagacagaagtcagcaaatttctgtctttggccagatacgtaaaatcattacattttattccatatattgaataaagatcataaatttcaaattctttattacttcaggaatttaaccagtccaatttttatgataagatagggacattttactctcatttgggtttcagtttaaacaaaaggtcttttcagtgaggtttcctactaggaatagcttttgcaggtgatcacagaggtttttctagctggtagcattcacaattgaggtttgcaaagcagtgtagggaactagagccgccacgacagggaggttggcgcctcgggccatgtcaccttcgatgcatcctgtctcatgtgccctctgtgttccccgtgggtcctgtgtagtgaaatgaaatactaactttgccctcatgtatggtaggtttgtgtgcagtgtgcagtgacaaaagtgtcttccaaatttgaagacagtatgtagagaattcatgtgacatgtttgtaactagcagataaaacctaaaaacaaaggaaattttaaacatcgtttaaataaagcttgtcgctcacgggctgcatggggcccaggacggctttgaatgtggcccagtacaaatccgtaaactttcttaaaacatgatgagattttcttgtgattttttttttttttaagctcatcagctctcattagtgttcactgattctatgtgtggcccaagacaattcttcttccagtgtggcccagggaagctaaaagattggacccccaggtttagattaccgacatcataaattgttttttttttttaattatccaggtatcaactagaaggtatcctaagtttaaagaccctattttagaagaaatagacatagcaagttactattgccaggcactatgtgctttgtgtcatttgatttacacactaaccctattacataggtacagtattattaattacccattatataagtaaggaaactgaggtttgggcagattaagcaactggcccagaacatcacagctagtgttaaaatgttaaatatgtcagtatattttttaaaagaaaaatcttgctctggattgatcagcgatgcgcttttcctagatccataagccatacttgagaacatgattagcatataacgacgtttgtatataacacactgtgtggcaggcaccattttaggcctttttacatgtgtgaactcatgcaaccctcacaaccctatgtttgcaaatccccctttaaagatgggaaaccaagtcacagagaggtaacttaacttgccagagtcacatagctaataattggagttgcggagctacaacccaggcagcctggatctagtgtgttcacataaccatgggcttcagtttgtctcctacgtggaaagctgagccatgcctagtcgacctggggtcgggcatcactccgtatgacagtgaagggctcattttatccgaacgggaagcaggacagccaggctgcggggggaacggcgtccctctgctgatgcctgtggctgtgtttgtgcatttacacgtcacattagcggagatgaatgccacttggaatccaacccaccgcagcagattacctcatgcaagagagaaaacagccctgcctgtgctagcctggctctgcgttgggctgtatttactcacggggcctcagctggccagggccttggagcagctctggggcccccgacccgggcaggaatcccagctcaggactagacgcacagaggaggacggggtggggaagagcagttccctcccataccctcgtcccctcccagcaagtacagagggtcgtacagcaatcgtcccgccttacttagaggctctgatctgcacaaaactggccagagctgaattcagcgcaaataaagactcggcccgccgccacttcagaaaggttgctgaccgctggctggaagccggcctcggagagtccacagctgagaagcatttctgagctgtctttagttagccctgggggtttcttccaccctctggctgtttctgcactgaactagaaaagatatcaaagacactcattaaagaaccagacccagtgactacaagcttggaaaactctaagcgcaaataatccagtgtttaaaagcaaagtgtagaatctgttgctacattaagctgtcgctgcccacagttaattttctgctgctctgcagacgtcatctttgtaggcagttttacaccaagagtttattaagttcattaaatcatagtatagttttccacatttaaaaaaaagatgtttctaatataagcactgctcattatcagagagatatattgaaatttcttttaaaaagctaagtagtaagattttcttgagagtgaatcattgtcaggtgacttaacctttgtcatctcgtttttttctttttgtttttgaggtagggtcttactatgtcacccaggctggagtgcagtggcgcgatcatggctctctgcaactttgacctcccgggctcaagcgatcctcctacctcagcctcccaaatagctgggatgagaggcacacaccaccacggttatctcatatgttttattacttttttgtagagatggagtctcactatgttagccagactggtctcgaacttctgggctccagtgaacctcctgtctcagagtcccaaagtgctgagattgcaggtgtgagccgccacgcccagcctatcttgttcttaatttaaaaagaacagttaagtttttgtaaaaaaaaaaaaaaaaaa

SEQ ID NO: 7527 - DNA, 2864 bp, Homo Sapiens
  XM_940124
ttaagtaatgtacattttatttaagtcatgtgatggattttcacagaatacatatgcccagggaaccagcaccagattacacaacagaactggatcagctcccagaagctctcccctcgtcccctcccaaccctaagggcgatcactatcttgactttggtgcactataaattagttttgtctggttctgaacgtaatacacctggaaccatctagtatgtactgttgcatttggcttctgtcactcaagatttcatcatgcgacttgtctatgttgctgtgtgtagccgggcatgtcaatcccgttgctgtgtctatgtgcatggtagtgagtagggcatcattcattttccattctgttgatgggttatttccagtttggggctgttatgaaagggctctgaacattcccatgcaccctcttgatgctcacacctacacatttctgctgggtgttgacagcctaggagtggaactgctggatcacagaggtggcatatgttcggcttcattagaaaactgccagttttccaaaatgtctctaccaatttacactcccccagaaatacaagagaggtccagtcgctctactttctcgcctccacacggtgcggtctttttcactttagccattctggtggtggagacccactcgtattcgcagcgcctggagcgtaattggcactcagttaacaagactgttgaatgaatggatgactgagtaagttgggcggtgtagaccaacagcctggcgagggcggacacacgcacgcactccacacacagcgtttcgcggacacccaccgcggctcacgcagcgcaggacacagaccctgtcgcgcaccccgcgcccacgtggtctgaacacacggcctcggccctgcctcgcgcgtccggtcgcaactcccgctctccgtccccaactcgcgcgtccgtccccaactcccgctctcggcggcgggcagggggcgctgagcgtccaggcgctccaagggggcgggcccgggtcggggcggggccggccgggcttccaggcctgggctctggccgcccgcgccaccgggccgctccggggacaggccggggcggggcgcggcggcaggaaacggggcggggacttgcggaggcgttggggacgagagagggcgcgccaactccaggggggacgcaggccgagagcgcggcgcccggcctggcgcggagcctgagccgccggacgggaggcggcctccgcgcggctcggccccggccccagccccgccagcatggccggccggactgtacgggccgagacccggagccgggccaaggatgacatcaagaaggtgatggcgaccatcgagaaggtccggagatgggagaagcgatgggtgactgtgggcgacacttcccttcgtatcttcaagtgggtgccagtggtggatccccaggaggaggagcgaaggcgggcaggtggcggggcagagagatcccgtggccgggaacgtcggggcaggggcgccagtccccgagggggtggccctctcatcctgctggatcttaatgatgagaacagcaaccagagtttccattcggaaggttccctgcaaaagggcacagagcccagtcctgggggcaccccccagcccagccgccctgtgtcacctgccggacccccagaaggggtccctgaggaggctcagcccccacggctgggccaagagagagatcccgggggcataactgctggcagcaccgacgaacccccaatgctgaccaaggaggagcctgttccagaactgctggaagctgagactatggaaatgatgttagacaaaaagcaaattcaagcgattttcttattcgagttaaaaatgggtcataaagcagtggagacacttcgcaacatcaacaacacacttggcccaggaactgctaatgaacatatagtacagtggtggttcaagaagttttgcaaagaagacaagagccttgaagatgagaagcatagtgtctggccatcggaagttgacaatgaccaactgaaagctctcattgaagctgatcctgttaaaactacacaagaagttgcccaagaactcaaccatcgaccattctatggccgtctggcatttgaagcaaattggaaaggtgaaaaagctcaataagtgggtgcctcatgaccttaccaaaaattaaaaaaatcgtcattttgaagtgtcatcttctcttattctatgcaacaacaacgaaccatttcttgatcagattgtgatgtgtgacaaaaagtcgattttatatgacaaccggcaacaaccagctctgtggctgtactgagaagcagctctaaagtacttcccaaagccaaccttgcaccaaaaaaaggtcacggtcactgtttggtggtctgctgctggtctgatccactgcaactttctgaatcccagtgaaaccattacatctgagaagtatgctcagcaaatcgatgagatgcaccaaaaactgcaaggcctgctgtggcactgctcaacagaaagggcccagttattctccatgacaacaaccacacatcgcataaccagcgcttcaaatattgaggccgggtgcggtggctcacgcctgtaatcccaacattttgggaggccaaggtggacggatcacttgaggtcaggagttcgagaacagcctggccaacatggtgaaacctgtctctactaaaaatacaaaaattagctgggtatggtagctggcgcctgtaatcccagctactcgagaggctgaggcaagagaactgcttgaacccggaaggtggaggttgcgatgagccaagattgtgccactgcactccagcctgggcgacagagtgagacttcatttcaaaaaaa

SEQ ID NO: 7528 - DNA, 159 bp, Homo Sapiens
  XM_940194
atgcccatggcggggcttctaaaggggcttgtacggcaactggagcagttcagagttcaacaacaagcttccaagatgccgcccaaaggaaaaagtggttctggaaaagcggggaaaggtagagcggccagagcgatcaaggagaatgggggcgggtga

SEQ ID NO: 7529 - DNA, 5724 bp, Homo Sapiens
  XM_940209
atgcagagaacacagccccgcccctgttacctgaacgccccacagcagtgcccgggggctgagcggccggggcgtcccaccgccggcagccacagcttcctcctccgcccgggacctctggccggaagcagtccgttcgccttactagaccccctccaagcctttgagcagttcgtgtgggtccgctcccaagctagggctgggctgttgcgcttgcgccaggggtcgcatgcagtcacgcgctgccgaccgcttccggtgcgccgcgagggccgccgggacgggtctccctggcgatccgtggtgtgccgctactgccggtgcagccgccaaaccggtgcctcggtgacgaccgtgtccctgccgtcttcctcgagctccccggggcttgacccccggggccctcggcaggcatcggtgaggagcctgcggagcgaacctgtgctcctattcttgcccttcaggaccccatatcgcgactccgaggaggggaagcgagaggggctgtcgcgactccgcgccgtgtgtcgccgggcggggccgcggggccggggctccttcagcccccgggatgcgcgcgcgagccctcgcctccacttccttgttgctgctgtcacgactggagccgcctctcgccgacagcggggagcgcgagtgcgccagccatccccctcgtccagccgccgggccaagcgcctccgggaatgtgagcggcgcagcttgcacgctcctccggccatggacgcatcatatgatggtactgaggtaactgtcgtgatggaggaaattgaggaagcctattgttacacctctcctgggccacccaagaagaagaaaaagtataaaatacatggagaaaagacaaagaaacccaggtctgcttaccttctgtactattacgacatctacctgaaagtgcagcaggagctcccccacctccctcagtctgagatcaataagaagattagtgagagttggaggcttctcagcgtggccgagaggagttactacttggagaaagccaaactagagaaggaaggtttggatcctaactctaagctctctgcactgactgctgtggttccggacatcccaggtttccgcaagatcctcccacgctcagattatatcatcatccccaagagcagcctgcaggaggaccggagctgccctcagctagagctatgtgtggctcagaaccagatgtccccgaaaggacctcctcttgtgtccaacactgccccggagacagtgcccagccatgcaggcatggcagagcagtgcctggctgtggaggccctggctgaggaggtgggagcccttacccagtcaggtgctgtacaggagattgccacctcagagatcctcagccaggatgtgctcctagaggacgcttccctagaagtaggggagagccaccaaccttaccagacaagcctggtaattgaagagaccttggtgaatggctcaccagacctccccactggaagcctggctgtgccccacccccaggttggggagagtgtatcagtggtaacagtcatgagggattccagtgagagtagctcctctgcaccagccacacagttcatcatgttgcctctgcctgcctactcggttgtggagaaccccacctccatcaaactgaccactacatatacccgccggggccatgggacatgcaccagcccagggtgctcctttacatatgtcaccaggcacaagccacctaagtgccctacctgtggtaacttcctaggagggaagtggatcccaaaggaaaagccagccaaagtaaaagtggaattggcttctggcgtctcttccaaaggctctgtggtgaaaagaaatcagcaacctgtcaccactgagcaaaattcctctaaggaaaatgcctccaaactgactctggagaattcggaagctgtaagccagctcctgaacgtagctcctcccagagaagtaggtgaggagagtgagtgggaggaagtgatcatctccgatgcccatgttttggttaaggaagctcccgggaattgtggtacagcagtcactaagacgccagtcgtcaaaagtggtgtgcagcctgaggtcactctggggacaactgacaatgacagtcctggagcagacgtaccaacaccatccgaggggacaagtacctccagtccactccctgctcctaaaaaacctacaggagctgacctgcttacccctgggtccagagctccagagcttaaaggcagagcacggggcaagccctcattactggctgcagcaagacccatgagagcaattttgccagccccagttaacgtggggcgaggcagcagcatgggactgcccagggccaggcaggccttttccctgagtgataagactccctctgtgaggacttgtggtctgaagccaagcacactgaagcagctgggccagcccattcaacagccatctggccctggtgaggtgaagctaccaagtggcccatccaacaggacttctcaggtgaaagttgtggaggtcaagcccgatatgtttcctccatataagtacagctgcactgtcacattggatttgggcctggctacatcaagaggccggggaaagtgcaagaatccctcttgtagctatgtctacaccaacaggcacaaacctcgaatttgtcccagctgtggtgttaaccttgccaaagaccggactgagaaaaccaccaaggctatcgaggtgagctcaccactcccagatgtactgaatgccacagagcccctgagcacagcccagagggagatccagcgccagtccacactgcagctgctgcgcaaagtcctgcagattcctgagaatgagtcagagctggctgaggtcttcgccttgattcatgaactcaacagctctcgacttatcttgtccaacgtgagtgaggagacagtcaccatcgagcaaacctcttggtcgaattattatgagtctccgtccacgcagtgccttctctgtagcagcccattattcaaagggggacaaaactccctggctgggccccaggagtgctggctgctgacagccagccgtctgcagacagtgactgcccaggtgaagatgtgtctgaacccccattgtctggccctgcacagcttcatagacatctacacaggtctctttaatgtggggaacaagctgctggtaagcctggacttgctttttgcaatcagaaatcagatcaagctcggagaggaccccagagtgtccatcaatgttgttctgaagtcggtgcaggagcagacagagaagactctgacctcggaggagctgagccagctgcaggagctgctgtgcaatggctattgggcctttgagtgcctcactgtccgagactacaatgacatgatctgtggcatctgtggtgtggcccccaaagtggaaatggctcagaggagtgaagagaatgtgctagcactgaagagcgtggagttcacctggcctgaattcctgggctctaatgaggtaaatgtggaggacttttgggccacgatggagacagaggtgattgagcaggtggcatttcctgccagcatccctatcaccaaatttgatgcgtctgttattgcccccttcttcccaccactcatgagaggagctgtggtcgtcaacactgagaaagacaaaaacctggatgtgcagccagtacctggcagtggcagtgccttggtgaggctgctccaggagggcacctgcaagcttgatgagattggctcctacagtgaagagaagctgcagcacctgctaaggcagtgtggaatcccctttggggcagaagactccaaggaccagctctgcttctccttgttggccctctacgaatctgtacagaatggagctagagctatacggcccccacgtcacttcacaggtggtaaaatctacaaggtgtgcccccatcaggtggtctgcggctccaagtatcttgtgcgaggtgagagtgcccgtgaccatgtggacctgcttgcctcttcccgccactggccgcctgtctatgtggtagatatggccacgtcagtggccctgtgtgctgacctctgctacccagagctgactaaccagatgtgggggaggaaccagggctgtttctctagccccacagagccacctgtgagtgtgtcctgcccagagctcttggaccagcattatactgtggacatgacagaaactgagcactctatccagcacccagtcaccaagactgccacgcggcgcatcgtccatgcaggcctacagcccaatcctggtgaccccagtgctgggcaccactccttggccctgtgccctgaattggcaccttacgcaaccatcctggcctccatcgtggacagcaaaccaaacggtgtccgccagcggcccattgccttcgacaatgccactcactattacctctacaaccgcctcatggacttcctcaccagccgcgaaattgtcaatcgtcagatccatgacattgtacagagctgccagcctggtgaggtggtcattcgtgacaccctctaccgccttggggttgctcagatcaagacagagacagaggaggagggtgaggaagaggaggtggccgcagtggcagaataagccaggctgttgtacagggactacaccatctctcaagccatagtaaggcccttgcctgaggcagagctatccaggggacctgcagaagtggtctcctgtggggagggcctctgactgctgggactgaccaaagagcttccattccctgagcatggtgggacccagggtcctcagttctcaaccctccaggggtcaggagtggtaccaggaaacctcttctggccccgagagagcacttgggggacacggtatgtttaatggaggggaggctgagggaaaggctggtagctggtgggttccgtggggcctgctgtgtgggtcagggtggaggtcctgggtgggctaaggcgtgagccccagcactaggtgggaaggctgctgaggtctctcccacccctgaggagccctggtttcagccccctcagtctgatgaattgcttagcctgttgcctttgactaggggcctgggtggcctcattaactctaggggtccctttgggctcttgattctccctgaaggagggatgcatttctctcttgctcttcctgtacccacatttgggggaagctgaggagggaggaacagtcagccacagctctcttccagcactgtcctctccaccccaagctttgaggaagagcatccccttcctcctttccctggccactgctgctgcagccaatatcctctctgggcctgggaccctctccacagaggggatgtggtccctggtcatgacataacctagcagcagtaggaaaaactcccttctatgaaggggaagcagactgggccataaggaaacagcaggactggctcaagtgcccaaggtttgtttagggcctgggaattggccatgtgttaatttattgagtggagtaggtggctttttttccctccctcttcccccaacaagaataaagtttattaaattatctggttttggtgtagcaggagtcaattccgtgcacatcgtatggggcacagtgtggtcaagctccacagctgtgagctcgtcacttcatgtgaaggagggaaggaaagaaagacgttccagggaatttgcaggtactcatgtggcacaaagaaccagaggctgactgcat

SEQ ID NO: 7530 - DNA, 216 bp, Homo Sapiens
  XM_940278
atgtctcacaggaagttctccactcccagacagggggccccgggcttcctgcctcagaagtgtagcggcaggcatcctgggaaggtgaagagcttccccaaggatgacccttccaagccagtccacctcacagctctcctgggatacaaagctggcatgacccacatcctgtgcaaagtcacagaagctgctgccacacgctactgtgtggtctga

SEQ ID NO: 7531 - DNA, 453 bp, Homo Sapiens
  XM_940286
atggttggacagactggcagaggcagccccgagctgttcctggggggtaatggttccacacacttctatggggacctggagagtggagaccagagcactggaagccctcggggaggtgatgccaccggcagcgctgtggttttggcacccacaggcataggatgggctgccgtggaaggtgcctgctgtccctcagggtctgtacctcagccaccctccaggtgctaccagatcacctggttcatatcccggagccccagcccggaccatgtggtgaaagtggccgagtacaacaaagtgaagctgagcatcttcattgcccgcctctaccacgactgtgacccgggattccagcacgggcttcgcagactgcaggacacagaggcacgcgtgcacatcatgtcttctaaggaatttgaacactgttgagaagactgtgtacaagagagatgt

SEQ ID NO: 7532 - DNA, 543 bp, Homo Sapiens
  XM_940289
tccagtatgctgctcttctgaggatccggcaagatggcagaagtagagcagaagaagaagcggaccttccgcaagttcacctaccgcggcgtggacctggaccagctgctggacatgtcctacgagcagctggagcagccgatgcagctgtacagtgcgcgccagcggcggcggctgaaccggggcctgcggcggaagcagcactccctgctgaagcgcctgcgcaaggccaagaaggaggcgccgcccatggagaagcaggaagtggtgaagacgcacctgcgggacatgatcatcctacccgagatggtgggcagcatggtgggcgtctacaacggcaagaccttcaaccaggtggagatcaagcccgagatgatcggccactacctgggcgagttctccatcacctacaagcccgtaaagcacggccggcccggcatcggggccacccactcctcccgcttcatccctctcaagtaatggctcagctaataaaggcgcacatgactccaaaaaaaaaaaaaaaaagaagtccagtatgct

SEQ ID NO: 7533 - DNA, 2147 bp, Homo Sapiens
  XM_940440
attcaagtcaatccatagaagtgggtcgtggaattccaggcagagagtgactaaatgaagatggaaggacagggagggggtggccacatcacagagaacctcttatcctaagaactctggacttcatcttcagaggcaaggtagagagagcaaggactttagagcaggaaaaggaccaggtcagtctagtggccatggggaaggtgggtgggaggggccgagatgggatgtatggaggtgcgtgaggtggaggcagtggtgagccaggaaatgtttaggacgtagaatcctcaggaattagagtgcggtgaattagaggggagaattgaggctgatgctcaagctcctggcttgggcaatgtgggtagttatgtcatacagggaactcggaagaagatatggtttgggggaagggaatgagttcactctggctatgagcagactttgtttgagatcccatgtcagacgtacttgaaaatgtccaagagttagctggatatgggtacagacagctttcgatttaactgaggtccgacttaagatttttttttactttatgatggtgcaaaagtgacacgcatttggtagaaaacataatttgacctttgctgtttccccaggacagtgatataaggttatgatactctcttgcgatgctgggcagtggcagtgagctgcagctcccagtgggtaaattaagcatggaaatctggaacacagcagcttttaagggatgcactggggagagcagtttgtaaaaataccttgggacggattaaatgtcttggcttagagaaagaacaacagacaataggaaactgtcattgaggagaagccgggattcaggagatgtacattattcaggtagctgagggaggggacaggaacctgaatcttcaacagaagcaaacaaactgggatggagggcccagcctcatgaaggtgaccagaaggacccggtgctgcaggctgtgtgggtagctgagcagagctaagcggcttgacggaccaacatctctccagctggttgaagacaagctctcagaagacaatgctgcatgtcacagccccagcaaccaacaacaccagcctgacaacttgctggggtggccgccttgtggtctgaggtggccgtctaaactatgtggtctgatctcaggctgcagaccttgcaggactgtcttcacacagactggaagtgctaacaggtggtgaggacaccgctttacaacgatgcagggggccccatgtcaccctcacccatgggaagtttgacttggtggactcagccaagccacagaggtctaacgcttctctgcggtgatttcaggctgccctggcagaaagcacagtgcctgcagacatgctgtcactgctccacacatcaacgctggcagtccttggggctctgtgtgtatatggtgcaggtcacctagagcaacctcaaatttccagtactaaaacgctgtcaaaaacagcccgcctggaatgtgtggtgtctggaataacaatttctgcaacatctgtatattggtatcgagagagacctggtgaagtcatacagttcctggtgtccatttcatatgacggcactgtcagaaaggaatccggcattccgtcaggcaaatttgaggtggataggatacctgaaacgtctacatccactctcaccattcacaatgtagagaaacaggacatagctacctactactgtgccttgtgggaggtgcacagcagcagacagtttgagccatcccattcaataaatgtttattgagtctttgtttataattacgaattgggaagccacagttaccaccagtgtgcttgtaaacagtttttaagataaacattcatgtggtgactctacttggagttgccaaattccacatattttctcaaagcagaagctttgcataagtctatacaagtgaccagcctcctctttttcagggttgtactctctcaccaacagcttttctaggtcacccatgcttatttttctggttcaacctctcctactcattatatattttttttctggtataatatatacacatttttagtgtgattcttttgtactagtcaatatgcattacataagttttctctgaccttcctatttctctcgattaaaaaatggatat

SEQ ID NO: 7534 - DNA, 5170 bp, Homo Sapiens
  XM_940451
atggctgaagaacagagaaaaatatggctggtggcttatgaggaaaacaaagtctgtcctttatcttcaccaaatcttaaagccaactcaggaattcaattactgaccgattatgtcgaggtatcgtacgtgcggccagccgagccggcgtttctggcccgcttcaaggaacgggtcggctacagggagggacccaccgtagagactaagagaattcagcctcagcccccagatgaagatggggatcacagtgacaaagaagatgaacagcctcaagtggtggttttaaaaaagggagacctgtcagttgaagaagtcacgaaaattaaagcagaaataaaggctgccaaagcagatgaagaaccaactccagccgatggaagagtcatatatcgaaaaccagtcaagcatccctcagatgaaaaatattcaggtttaacagcaagctcaaaaaagaagaagccaaatgaagatgaagtaaatcaggactcggtcaaaaagaactcacaaaaacaaattaaaaatagtagcctcctttcttttgacaacgaagacgaaaatgagtaagtgtaaatattttgaattcagtctactttgaaagtatatggagtgttcattaaaatcacatttttttcctattataaagatactacaagttctttatagaaagtttaggaaatagagaaaaaaatttaataaactacatctattcatcaatacccctctgacttaaaatgccaactctatagaaattagctagtattaacattttgttatttcccttgtgtggttgtatatatatgtaaattatatttctaagcaaaatacattttttgtgtgtgtaaacaaaattttataaatacaactgtattgcaaatgttctttgtcctgcttctcacttgacattgcattatgagtattcttccaggtcagtaaatttcaaaaacctgacattaatagctacagataatttcataaacatctcattgtatctttttcattagcaatagctccactttgggtgggggagatgataatgtgctttgttaaaaatacctccccaactcctgctaagggtggccatgagactcagctctggcaagttaagaaatacaggtggaattctgcttgataaagctgctgggtttttttgttacaaaaggacagacttggcaagcatgagcctttgctcttatcttttcatcctacttggagtgcagagataaaacctgagtaccagagccacttttaggcataaggaaggcagccatgtgctttgggtcatgttagtaaaaagactcagagcttggctccttgctgacatgcctggaggagctgctacaccagcttggattgctgacctctgacttcttggtagtgagaagaataaacactgtgcttaattaggcctcggtcaggtttctcttatatgcagccaaatgcagtcctaagtaatacaataaataactggtcaaactgttactggtggagggtgtccaggttcttggcattttggacaaataattgaacaaaacgcacaaagcaatgaatatcctctagaggtttgccattggttacttggcgtacaccctgtgtaaatgaagtagtggcccgtgacctgtctgattggtgcagaaagtgaccaatcagaggctgaagtgaagttacaaagttatactcctgtgtaaatgaggacttggcttatgaccagtctgattggttgcaggaggggaccaatcagaggcactttcatttttcatctgcaatgcagaaaaggcaaggggattgcaaagggagtagcctctgatccttttgttacttaggtatggagaggtggggttttccttttgattcagttctaggaagtcaatgtgaatcagccttaggttccctgtctccagaccctattctcctgcctcattttccccctgagagacgtgatcctcgtaaatctttatgggaggctgagagactgagggtctttcttctgtaactgcttcatgctaacttgggacacagtccctacctattggagatcacgtaactctcaccctgctttgtctaggggagacagggtagcttcttgatggccggtggtgtcttctcctgaaactggctagaaatcttgtcacatgatcatctaacttggtggtctctaggcaaaaggaaatggatttggttaaaagatttaacagatatggtccaaaaaccaaggcaaatataatcattaataatgggctggccaagggagggagccatgaaacccaacttagtgccctttaggtgccccagctgttgtcatattttagaggcccagtcagctagttttcaggtggtgtcccttactaatcctgattggttgacatcaaaacagcattcttcttctaggaaaatacataagccacctgtttcagcagttaggagatctagtccccttcgattttgcaaagcgaccactgccaaggagcctatccgaatttgtaaggtgacaatactttgagcaatgttatccaggctttccataaaatccttggacaagcgttggtaataggatagggaagttgcaatcccgctaactcccattcctacctctgctgttattcctagccgttgtgtctggtggttgcagttaaaggtataatgagggattggttgttgggagctatattaatttagggacatacaatatttctgtctccagtctaccacttccaccaaagacaaatcacagcagaaccgacctaacttcaaaataaactgcagtcccatatactgggcctgattacccacacaaagtgcaacaagaatcattgtccatatagactctcctagattggctttgctagaacatttcacaaggccatttcagtcaaagtcctgagaaagtaaccggtttcaattgtgccctattacaaaagaaaacgtggttattaactttatacagacaaatgccatgaattaagaatattcataaatagtttacaaattctggagaaattagaatactcaatacacttaaagtgtatttcaaggctataaatagctcaaaataaaaagattattcagactctgaaaaaacaaaaagaagtagcaatatttcaaacaacaaaagccatacaaattatttcagtcttccattagttcatttcagtccatgtaatcaactcctgctctacttcatattcatctttatgaacacatcagcctttcaattagtgccttggaagttttctgtctaatccaatggcacactctccaaagttaccagaaacctgcattcaagagttcttttcatgaactccaaagaagtaagccttggactgtagctgattataagtcactttttttttttgagaaggatcacagcaaaacatcaattatggatgacaaaagtcttaagacagccataaagacacagttgacaaatgtggctatttctgtggcttacaacaatttaacataatcattacaacatatattaagacatatcagaattttagaactctcatacaatcctggaacacatattaacaacaaatctctatcagtataacccaaaggaagctaaacaccacttcacacttgacaatgtttcctgtataattcaaacattacaaataagcctaatatgtcactcttgaacttcaggaagcctaatatccaaaaagttagtttagggtcaaaagtttttgaattaacttttttccattagtatggtcatatctttcttactaatttgtaagttatgtaatttatcaatttttttgttgttgttctgtttcccaacctctatgtcagataaagaatcacccaggccagacacaatggctcatgcttgtgatcccaacactttgggaagccaaggtgggagaattgcttgaagccaggaatctgagcccagcctgggcgacaaagcaatacccctatctctacaaaaaataaaaaatagccaggtgtagcgacacacacctgtggtcccagctgctcgggaggctgagcaggaggatggcttgggcccaggagttcaaggctgcagtgagctatgattgcgccgctgcactccagcctgggcaacagagtaagaactgtctcaaaaaaaataaaaaatagaaataaattttaaaaaaagaattacccatattctctttgtttttgtttattcacattaacctttattctatctggaatttatttgagtacacttttttctcaaataatcaattgtcctagaaccatgtgtttctcatttgtttgaaaggccatctagtgagagatttctccaaatgttggggtagggaagggaggggaagcactttaaagtctgagcctttacaggtgattcctcaagaccctgcttaatcctaataattttcctcattagtaaaagtcagcccaaactgggggcttgttaagatccttaccagccacatccatctgaaattatgaatttcaaagtatcttacaaattttgtgccacattatcttttttaagtttgttttgttttgttttttttgggacagagtctcgctctgtcgcccaggctggagtgcagtggcgcgatctcggctcactgcaagctccgcctcctgggttcacaccattctcctgcctcggcctcccgagtatctgggactacagtcgctcgccaccacgcccggctaatttttttgtatttttagtagagacggggtttcactttgttagccaggatggtctcaatctcctgacctcatgatccacctgcctcggcctcccaaagtgctgggactacaggcaggagccaccgcgcctgggcctttttttaagttttaagtacctacaaagaacactgaaaggtgatgtgtgtggatgagctaggaagacctgaaataggctctctctaaattaatcaaattaatcctgaagccattctgcaataatgtctttaatgtatactcacttgttatagaagccagggttttttcccctaatttgtatcattgctatatgtgttattgtaccaaactacactgttttaattgctgtaaattttaatatgtcttagtatctgggtgtgggaatcttgaaagcatggagtttgtgttattcaccactgtattctcaatatcagaagagtatctggcctactaagtgcacaataaacatagttaaaatgaaaaaaaaaaaaga

SEQ ID NO: 7535 - DNA, 430 bp, Homo Sapiens
  XM_940585
ccaagacagaaatatcttttcagaccgccgccgcgccgccatcatggacaccagccgtgtgcagcctatcaagctggccagggtcaccaaggtcctgggcaggaccggttctcagggacagtgcacgcaggtgcgcgtggaattcatggacgacacgagccgatccatcatccgcaatgtaaaaggccccgtgcgcgagggcgacgtgctcacccttttggagtcagagcgagaagcccggaggttgcgctgagcttggctgctcgctgggtcttggatgtcgggttcgaccacttggccgatgggaatggtctgtcacaatctgctccttttttttgtccgccacacgtaactgagatgctcctttaaataaagcgtttgtgtttcaaaaaaaaaaaaaaaaaaaaaaaaaaaaaaaaaaagaaatgcc

SEQ ID NO: 7536 - DNA, 2138 bp, Homo Sapiens
  XM_940642
atgacttccaaggggacctggggccagataagccctgccccgatgaaagacgactcaggaacggccctggtgaaggaagacactttcagggaagaggctcttacagtctatggtggtagccatcttcacatccagtcaccagttgcatctagggagctgctggctataaaagggatcatccacccaccagcctgcctggttgatggacagcaggctctgccttctggaggcggcttatatcccaacagcctgaggcagggctctgtggcccaggccagcagtggctgcctctcttggttctgcatggtacattttgccaaccctgaggaccagttcttggggttccaggcctcggccttcctgctccacgtgctcaagtccccacatggggctgcgacaccatctggctcctcacagggaggtccagccatgttctgtgggctcccagtgagccccctcccctccggctacccccagaatccatccttcattcctccaccaagctcctgtgtgagctgcagcgcccacacgggggaagccctgcactccagcagcatcttccagccttggcacagaactgatggcaaaggaagggctgggttttcagcttctgggacccgaggaagaccccacctcactcctccttccccagtacatcagactggttaggaggcatcccagaaggggcagcctcatgcccaggtttcagccctaaaggtaatgattgtcttgactctgccttggcatttcgctcggaatcacggcagacttggagtgtttcttcaaggcaggcatctgcttatgagcaaggtcaaagatttttcaaaatattgtgcattaattcattaaagctactgttaaatatttgctgtttttagattggcgtccgtgctaattctgcagttgtagcactgtatattttatctcatttctgtgccaagaaagttcatctttatgtttttctaatacacaatcttgatcatgtttccaaaataaagcttcagctccttggtcaatagaagtaagggtgtagccatccagggtctcccggctctaggcagaccggatcccgcggttcatcccatggttgttgaaatgtacctcgatcagtcatctctggtattcctcactctggccatgagccattgccatcttatgggcccgatttgggtactctgaattatgtcatggagtagacagttacttctaaatcccagcaaccaagttgcgtatccttccttatagctagtttctatagagaagtgaaaaagaaatctggcttccttaataagatagttgagcctatgacattaaggagcagcgctgctggcggaagattctagattcactggtggtttaagaggcccagggatttagttcttactggtgcgtaagtgttttcccatcctaaccggaaaaccactcacccaggcttcccccacttcccctcaaattttctcagctctgccgctggtctccatgaacggcaaggggaaccaccactcattcactgtcagtgtaggtaagacagaggatgcccttgcaaaaattgggactgaggacagtagcacacggaatggtggatcgtacatttgcacccagagctactaaacgctcagtgaccccagagaccattaatttcccggagtgaaggggatgggggtagagctaattggaatttttattatccaggactcatcctaagaagaatgttggcctctcttcatccctggcttagccgtcaggtagaacgcttactcacctgacaccgacttcttagagaagcgagtcttttttgaatggaggagcgatggtaaccccactagggggcgcccatgatcggctcccagtgcacccccttaagggtaagcaggccgcatatctagagtctgatagtctgtgtgtacataaggtctagaagtctgtggaaacgccctgaaacttgtagtattatcttaactaccctcttatgttaaggtttacataataggatttttaaacaaatgtgtttaattttttaagatctcttgtattaaaattttcttttggaataagctgtggaaattttgttacaacctggttgagatcaacctctttacaatgacacaaattgtgacattttataaattagatacttc

SEQ ID NO: 7537 - DNA, 1130 bp, Homo Sapiens
  XM_940643
atggttctacttggttgcatgtgggtcacaaaggatggcgccggagaaaggagcacccggcagcaccagccctgtccccattctacaacgcctcctacccctgtccccgccgtccgggccagggagagggcactgagggcaggacccaaaggaagcacctggttgggccgggccgggaagcgaaggcccactcctcggctccggggaggcggccaccacggcttcgctagccgcgtcccgagccacgccagctgcagccagctgtgcgcggcttgttcgggcctgagctggcgctacgaagttccggtccaggtctctgacttcgggcttgttcgctggtggcgtcggagccgagccggactggtcaggatgatcacggacgtgcagctcgccatcttcgccaacatgctgggcgtgtcgctcttcttgcttgtcgttctctatcactacgtggccgtcaacaatcccaagaagcaggaatgaaagtggcgctttctccgccccagggttccaggacatagtctgaggcaagatggagggtatgaggggccttcacacttcacttcatcccttctacccatcacaacatacaaagcaactacacctggatttttccaaacaacttttatttcctcagagtcttccttaatcctatggaacaagaagctgccactgaatagggcccagtataggggcttgcttttctactccctccccccaatataaaaatatagacttttttttgtggtcccaaaatcttgtgctgcggagggagggaaggggtggcaggtccctgttttgttctgtctcaaggtgatactctgtaatgccttggacagcgtggctggcattccaaggacttaacggctgtcacatggaatcagcggcctggaggggaactagcatatttcccactgttaccccatcttggggctatatcctgggcttgaacataaaggcattatcagacccggggagaaacagtcagtgggggagatttagggacaaaacaaacctcaggttggcccaagggacccctgctgtaacaattccaggatggggagtcagatagactacaggatataggagaaaaggcaggggcagagcggggccgtgggggcctggcctga

SEQ ID NO: 7538 - DNA, 1901 bp, Homo Sapiens
  XM_940702
aatgctgtttcactggaggacacggctaagaaggaagtccaccagcctgccaagatgaattgccttgaagggccaggtaagacctgtggccccttggcttctgaggaggagctggtgtctgcctgccagttggaaaaagaagaagagaatgaaggggaggaggaggaagaggaggaggacgaggaggatctggacccagatctggacccagacctagaggaggaagagaatgatcttggggatccagctgtacttggtgctgtccacaacacccagagagctctgcttagctcccctggagtcaaggcccctggtgtgctgggaatgtcacttgcctccttgcattttctgtggcagaccttggactacctgtcgcccatccctttctggcctacatttcccagcaccagctctccagcacagcactttggacctcggctgccctcaccagacccaactctcttctgcagcctgctgacctcgtggccccctaggttcagtcatctgacccagctccaccctcggcaccaacgaatcttgcagcagcagcagcatagtcaaacaccaagtcccccagccaagaagccttggtctcagcagccagacccctatgctaacctcatgaccagaaaagagaaggactgggtgataaaagtgcagatggtgcagctgcagagtgcaaaaccccgcctggatgactactattaccaggaatattaccagaagctagagaagaagcaggcagacgaagagctacttggacgaagaaaccgggttgagtccctcaagctggtaacgccttacattccgaaggcagaggcttatgagtccgtggtccgaatcgagggttccctgggccaggtagctgtgtcgacatgcttcagccctcgccgagctattgatgcggtaccccatggaactcaagagcaggatatagaagctgcaagcagtcagaggcttcgggtattataccggattgagaagatgttccttcagttactagaaatagaggaaggctggaagtataggcctccaccgccctgcttttctgagcagcaaagcaaccaggttgagaagctcttccagaccttaaagacccaggagcagaacaacctggaagaggcagcagatggcttcctgcaggtgctctctgtgaggaaggggaaggccctggtggcccggctgctccccttcctgccccaggatcaggctgttaccattcttttggctatcacccaccatctgcccctcctggtccggagggatgtggctgatcaggccctacaaatgttattcaaacctctgggcaaatgtattagtcacttgaccctccacgaactcctccaaggacttcagggattaacgctgttgccacctggctcctcagagcggccagtcaccgtggtgcttcagaatcagtttggaatatctttgctctatgccctgctgagccatggggagcaactggtatcgctgcattcttccctagaggaacccaacagtgaccatacagcttggacagacatggtggttctgattgcctgggagatagcccaaatgcctacagcctctctggcagaacccctagctttccccagcaacctacttcccctgttctgtcaccacgtggacaaacaattggttcagcagctggaggccaggatggagtttgcctggatttactgatctgtttgttctggaatacgtgtatgtgggaagttgaatcatcagacactagctacatagactatgtttacagggatccagagagtctgaagacatttcttatgcctttatatattggagaacccttccccattttcatatcctttcttcaaaaatctaaatgatgtgcctaaaaataagacatggcataataaggtataattaaagagataata

SEQ ID NO: 7539 - DNA, 889 bp, Homo Sapiens
  XM_940809
ggcccgaaatcgtaggacttccgaaagcagcggcggcgtttgcttcactgcttggaagtgtgagtgcgcgaagatgcgaaaggtggttttgatcaccggggctagcagtggcattggcctggccctctgcaagcggctgctggcggaagatgatgagcttcatctgtgtttggcgtgcaggaatatgagcaaggcagaagctgtctgtgctgctctgctggcctctcaccccactgctgaggtcaccattgtccaggtggatgtcagcaacctgcagtcattcttccgggcctccaaggaacttaagcaaaggtttcagagattagaccgtatatatctaaatgctgggatcatgcctaatccacaactaaatatcaaagcacttctctttggcctcttttcaagaaaagtgattcatatgttctccacagctgaaggcctgctgacccagggtgataagatcactgctgatggacttcaggaggtgtttgagaccgatgtctttggccattttatcctgattcgggaactggagcctctcctctgtcacagtgacaatccatctcagctcatctggacatcatctcgcagtgcaaggaaatctaatttcagcctcgaggacttccagcacagcaaaggcaaggaaccctacagctcttccaaatatgccactgaccttttgagtgtggctttgaacaggaacttcaaccagcagggtctctattccaatgtggcctgtccaggtacagcattgaccaatttgacatatggaattctgcctccgtttatatggacgctgttgatgccggcaatattgctagtaagtgatgatatacttcttttcttaactcataaaaatctctttttgggacctagaagatatgtttaa

SEQ ID NO: 7540 - DNA, 2706 bp, Homo Sapiens
  XM_940851
atgggctcaggtaaactgggccaaatattgaagcagatttggagacaaaaccagatgctaaagcaggcactcttgggtgatgacctttgtgagggggctggtggggccacttggatggccactgtggtctttctgggtcaggaactcagcagtgcccttcaccagctgctggagcacacctcaggcaccctgcgttccacctgccagcagctgcatgtgctgcttgacaaagagaatcaatgtgtctcgagaaaagaaatcattactttcatagactgcctcataaaaataactgaacatttggggagcactgctgcacttctaaagaaagaagaaaaggagatttgtaatttatgcggcatgcatgatgaatgtactccacagcagacaatgtcctccattcaagataccaaagcagcagacattgctgcaagaggggaactaaatgtcatagaaacagctactgtttctcccacaaatggagaggaaagtcattacacaaaccaggtccagttagaaaaaaataaaacacatatgagttcagcattagtggaaaaagaaaacaatacatcactgaatggacgtgtcctggggcaagaagagtcacagaataaaatgttcccagataatgcagaaaatgaagatgataaacaaatagaacacatgactgttgagaacataaatggcaacagggaagagactcatggcataattcagacaacagagacagaaattcaagagacttcagaaagcccaagagaagagatgaccacatcctcaataatatgtgatatctccaagaaatatataaatagtactcttcccaatgattcagagaatataaagcacaagaataacataatggaaaaggagtatcttgatgtgctgagtgatgatactggcccccaagtgtcttgttatattacagcaccatcatatgttctacaacaactagaatgccggataataaatcacatgagttctttaatagtgggtgataatgaagagttagttagcaacgtcataactattgaatgctcagataaggaaaagagagttccatttccaataggcattgcaattccatttactgcacgttacagaggaaattacagagatatcatggtgaaagtgtgtgacataaaccttcaatcaagttacctaaacccaaattcactagaaggaatgaagggaggttataaggggacctgtgcttcagtaaaagtttacaaattgggtatcttttctgttgtgtcttgtttaaagaaagagtcgttcacagtaacaaagaaaggcctcgctcttaagtcaagcatggattcccgaatatccttaaattaccctccaggagtttttacctctccagtgctggtgcagttaaagatccaaccagttgacccagctctggtggcacatttaaaagcacagcaagatactttctactcagtccaatccacaagccctctgattcacattcagcacccatcaacttatccttttcagaagccagtcactttgtttttaccttgttctccataccttgataaaaacaaccttggttctgagatagatcataaaagaagagcaagtgccacaataaataggattacaccttcgtatttcaaccggacaaaaattgcctccataagaaaacctaggaaaaatgccagtgaatgtttgaaattactgggattcagaagccaagacagtggttggtgtgggcttgatgatgttgtgaaaaccatacagagcggcttggtatcagttgaattgtatgaacatttggagaggtttattgtacttcacctctcttccaccatggacaatagtcatttggttacttttgtgaaatctttagaggaagccatgctcagcaccactgcctgcatagtactgtctcaccagaaggacaatccacatagaatagctgttttagtggtgccttccaaagatttaagccaggtgcttaaggacctgcacttggaagggtttggaggacctccagagccatctcgtcatttccaagttcgagaaggagaacaacttcttttaagatttactggaaacatatttgcttcaagcaacgggaaggattatggaaaagactacacacttatttttcacttgcaaagaaaacctaggctggaactccaaatcaaagaagtggacgaatttggaaactatagctgccctcattacaaaggcaccattgtcgtttataaagtacctaaaggaaagatagtccccaacttgaatcaatctctcgtaattaatgaaaaccattctcagttgccaatttgcaaattaccattgaaattgccaaagcataagaaattaatcaaccgtccacagagtaccaaaagagtttctaaggatcctgtagaagccctttgggataacttgctccattggctggctgaggagctctcagaagaaaatgctgagtctctttcctcaactctccctctgcgccgtagcaccattcagctcatcaaactcaagaaccctgatgatctcacagaacagatccacgagtttctttgcttctggaaaaaatcgcttccaactttcaccgacaaacttcgcctcctggctcgacatctccgcaagattggcaggagtgatcttgcagaagagctcaaattcaagtgggaaaataaagtgttcactgaaccacagcagtgttttgatgtagcccctgagtaa

SEQ ID NO: 7541 - DNA, 4049 bp, Homo Sapiens
  XM_940903
atgcgaccggactgcaattcccagaagccgtcgcaggccctcagcatccgggacactagcagcaaggatccctggccggacatagaaccacaactcccagcaacccctgctgccgtgtggggggtcttcacgttctcgtggcgcggcgcaggcgcactgggtcctcggcgcggaccgcgcagactgaataataaaaggggagcggcgaagaggcaggaagacaagaccatgtcgaagggccccgggcccggcggctccgcagcttcctcggcgcccccggccgctaccgctcaggtgctgcaggcacagcccgagaaaccgcagcactacacgtacctgaaagaattccgcacagagcagtgcccactctttgtgcaacacaaatgcacgcagcatcggccctacacctgcttccactggcacttcgtgaaccagcggcgccgccggtccatccgccgtcgggacggcaccttcaattacagccctgacgtctactgcaccaagtacgacgaggctacaggcctctgcccggagggcgacgagtgcccattcctgcacagaaccacaggggacactgagcgcaggtaccaccttcgttactacaaaactggaatctgcatccacgagacagactcgaaaggcaactgcaccaaaaacggcctgcactgcgcttttgcccacgggccccatgacctccgctcccctgtctacgacatcagggagcttcaggccatggaggccttgcagaatggccagaccacggtagaggggagcatagagggccagtcggctggggctgcgagccatgccatgatagaaaagatcctcagcgaggagcctcggtggcaagagactgcttatgtgctggggaactataagacggagccttgcaagaagcccccgcggctgtgccgccaaggctatgcctgtccctactaccacaacagcaaggaccggcggcggagcccccggaagcacaaatacaggtcgtctccatgtccaaacgtcaagcacggggatgagtggggagaccctggcaagtgtgagaacggagacgcctgccagtactgccacacccgcaccgagcagcagttccaccccgagatctacaagtccaccaagtgcaacgacatgcagcagtcgggcagctgtccccgaggacccttctgcgcctttgcccacgtagaacagccacccctgagtgacgacctgcagccttcctcagctgtgtccagccccacccagccaggtcctgtcctgtacatgccatctgccgccggagactcggtgcctgtgagcccctccagcccgcatgcccctgacctcagtgccctcctctgtagaaacagcagcctaggcagcccgtctaacctctgcggctccccaccgggctccatcaggaagcccccaaacctggagggcatcgtcttccctggggagtctggcctggcccctggcagctataagaaggctcccggcttcgagagggaagaccaggtgggagccgagtacctgaaaaatttcaaatgccaggccaaattaaaaccccactcattagagcccaggagtcaagagcagcctctgcttcagcccaaacaggacatgctgggcatcctccccgcaggcagccccctgacctcaagcatctcttctagtatcacctccagcctggcagctaccccccctagcccagtgggcaccagcagcgtccccggcatgaatgcaaacgctctgcccttctaccccaccagcgacacggtagagtcagtcatagagtctgctttggatgacctggacctgaatgagtttggcgtggccgccctggagaagactttcgataacagcacagtgccccacccaggaagcatcaccatcggcggcagcttgctgcagagctctgcgcccgtgaacatccccggctccttgggcagctctgcctccttccactcagcatccccgtcccctcccgtcagcctctcctcgcatttcctgcagcagccccagggccacctgagtcagtcggaaaacacatttttgggaacctcagcatcacatggatctttgggtctgaacgggatgaacagcagcatctgggagcattttgcctctggaagcttctccccgggcacttcccccgctttcctatcagggccaggggctgccgagctggcccgacttcggcaagagctggatgaagccaacagcaccatcaagcagtgggaggagtcctggaagcaggccaagcaggcttgtgatgcctggaagaaagaggcggaggaggctggtgagcgggccagtgcggcgggcgccgagtgcgagctggcccgggagcagcgggatgcactggaggtgcaggtgaagaagctccaggaggagctggagcggctacacgcggggcctgagccccaggccctgcccgccttctccgacctggaggcgctctcactctccaccctctactccctccagaaacaactgcgggcccacctggaacaagtggacaaggccgtgttccacatgcagtcggtgaaatgccttaagtgtcaggaacagaagcgggcagtgctgccgtgccaacacgctgcgctgtgtgagctctgcgctgagggcagcgagtgccccatctgccagcctggccgggcccacaccctccagtcgtgaccctgcaggcctggcccagcctggcccagatcttctcacctaggactttttaaagtatatatatatatatgaatatatatatatatgtgtatgtatgtatgtatatgtatatgattatgtatatgtatacatttccgtatgtatgtatatgtatacatttccgtatgtgtgcaggtatgcgtggtggtgtggacagtgtctgtgtgtatatctgtacatagatatagacacacactttaaaagacttaccaagcactttttaaaagaagaaactattttgcagtcctcccctacccactccctgcccttcccactgcagagatgacatcccctcttctcccactggccttttggcagagaatctggttctgtctcttttttaatgtaggaactaactatttttaacttcttcctggggcctgagcagggaagggtgggactggaaggcactaaggggaagggagaagccctcagggcaggccctgctccccctacctccttgccagggcaagggtggagtgtggaagacgtgggtcccccagagcaggcctggcccccagctgtgagggcctcagggaggcccgagggggagtgctgggggtctcagctggcttagctcctaagtttaccaaatgttaatttagtcttggggagaacagcaagggctggaggccagtgctgcagggccagccccactcctgacacctgggcccttgaagctccttgaggggcaaggcccaggagttccagccctcaggttcctgagggtccaccctcagtccttccccccgccgcccctccccggactccccacaagagcctccctggccccagggccgcctaccaggctggtactcattctatgaccaccgcccccaaccagctgcccccagctctccctgccccctcccctctctggcagctagcagggcaattggcggggaggagtgcggactgaggactgaggaccaagggggcccaggccctgccctcctacccggaggggctccgtttgcattccttggtgctctctgagtgcagctggtgtcccgccctgttctgggcggacgcctgtgtgcgtgtgtgtgtgcctgtccagtgtatattgtgtcttagcttccattttaaaaattgttctgtacagagagagatgcagcaggggcgggagggcagagtgggcggaggggagcagccgcacccccagcaccgggtgtctgcggtaggaacaagagggctgagagggtctggtcctggcccaggctcccccttgggctcagcacgaaagggctttcaatgaattaagtgaaaactttttccttttttacaaaaatgcaaaaatcaacaaagctccaaacctattggaaataaaatatgaacttgcagtggta

SEQ ID NO: 7542 - DNA, 1025 bp, Homo Sapiens
  XM_940962
atgttgggaaggtcacgtcggctgcgtcaccgccccgccccgccccgcccctcccctcccgcgctgccgctgtgcccatcacttccggtcgcgccagccgcccgttgccagttctgcgcgtgtgctacggccacgtggcccgcggcttcccgctcgcgcagtctggcagcccggagccttccgcggtcccccgcccgcccggggcccaacgacgccctactgggcgagcacgatttccgaggacagggggtccgggcccagcgctttcgattctcggaggagccgggtccgggggccgacggggctgtcctggaggtccacgtcccgcagattggagctggagtgagccttccaggaattttggctgccaaatgtggtgcagaagtaatactgtcagacagctcagaactgcctcactgtctggaagtctgtcggcaaagctgccaaatgaataacctgccacatctgcaggtggtaggactaacatggggtcatatatcttgggatcttctggctctaccaccacaagatattatccttgcatctgatgtgttctttgaaccagaagattttgaagacattttggctacaatatattttttgatgcacaagaatcccaaggtccaattgtggtctacttatcaagttaggaggcaatgctgactggtcacttgaagctttactctacaaatgggatatgaaatgtgtccacattcctcttgagtcttttgatgcagacaaagaagatatagcagaatctacccttccaggaagacatacagttgaaatgctggtcatttcctttgcaaaggacagtctctgaattatacctacaacctgttctgggacagtatcaatactgatgagcaacctggcacacaaactatgagcagaccacttcagcttgagaatgcagtgggtctgaagatggtcaagtctgtttgccttagattttgatgtcacctagacaacacttaaactcatatgaaacaaaaattaaaatacgtattacaagtacttggatt

SEQ ID NO: 7543 - DNA, 1041 bp, Homo Sapiens
  XM_941060
agtgctgccgggcaccggggaggcaggttggtgtacgctgtgcgcggcggacgtcagaggcagcggggagcggagcggggccgccggggcctctccagggccgcagcggcagcagttgggcccccgccccggccggcggaccgaagaacgcaggaagggggccggggggacccgcccccggccggccgcagccatgaactccaacgtggagaaactgcccccgcacatcatccgcctggtgtacaaggaggtgacgacactgaccgcagacccacccgatggcatcaaggtctttcccaacgaggaggacctcaccgacctccaggtcaccatcgagggccctgaagggaccccatatgctggaggtctgttccgcatgaaactcctgctggggaaggacttccctgcctccccacccaagggctacttcctgaccaagatcttccacccgaacgtgggcgccaatggcgagatctgcgtcaacgtgctcaagagggactggacggctgagctgggcatccgacacgtactgctgaccatcaggtgcctgctgatccaccctaaccccgagtctgcactcaacgaggaggcgggccgcctgctcttggagaactccgaggagtatgcggctcgggcccgtctgctcacagagatccacgggggcgccggcgggcccagcggcagggccgaagccgggcgggccctggccagtggcactgcagcttcctccaccgaccctggggccccagggggcctgggaggggctgagggtcccatggccaagaagcatgctggcgagcgcgataagaagctggcggccaagaaaaagacggacaagaagcgggcgctgcggcggctgtagtgggctctcttcctccttccaccgtgaccccaacctctcctgtcccctccctccaactctgtctctaagttatttaaattatggctggggtcggggagggtacagggggcactgggacctggatttgtttttctaaataaagttggaaaagcaaaaaaaaaaaaataataataataata

SEQ ID NO: 7544 - DNA, 2324 bp, Homo Sapiens
  XM_941061
gggggaggagaggcggcgggcaggtgggcgtgaaactattcctctcccccccataagagcggagcgagacgaataaatatattccagctaagtggacgtggatggttttctgcataaactcttattgttccttgactgatgtcataacactggagatgcatgctccttagatgaatgtgagcgtcctgaccaccctggagcgtaggttcaacctgcagagcgctgacgtgggtgtgatcgctagcagcttcgagatcgggaacctggcgctcatcctcttcgtgagctacttcggggcacgcgggcaccggccgcgcctgatcggctgcggcggcatcgtcatggcgctgggcgcgctgctgtcggcgctgcccgagttcctgacccaccagtacaagtacgaggcgggcgagatccgctggggcgccgagggccgcgacgtctgcgcagccaacggctcgggcggcgacgaggggcccgaccccgacctcatctgccgcaaccggacggctaccaacatgatgtacttgctgctcattggggcccaggtgctcctgggcatcggtgctacccctgtgcagcccctgggcgtctcctacatcgacgaccacgtgcggaggaaggactcctcgctctatataggaatcctgttcacgatgctggtatttggaccagcctgcgggtttatcctgggctctttctgtaccaaaatctacgtggatgcggtcttcattgacacaagtaacctggacatcactccggacgacccccgctggatcggagcctggtggggtggctttctgctctgcggtgccttactcttcttctcttccctcttgatgtttgggtttccacagtccctgcccccgcactcagaccccgccatggaaagcgagcaggccatgctctccgaaagagaatacgagagacccaagcccagcaacggggtcctgaggcaccccctggagccagacagcagtgcctcctgtttccagcagctgagagtgatcccgaaggtcaccaagcacctgctctcaaaccctgtgttcacctgcatcatcctggccgcctgcatggagattgcagtggtggctggcttcgctgcctttttggggaagtacctggagcagcagtttaacctcaccacctcttctgccaaccagctgcttgggatgactgcgatcccgtgtgcttgtctgggtatcttcctgggaggtcttttggtgaagaagctcagcctgtctgccctgggggccattcggatggccatgctcgtcaacctggtgtccactgcttgctacgtctccttcctcttcctgggctgcgacactggccctgtggctggggttactgttccctatggaaacagcacagcacctggctcagccctggacccctactcgccctgcaataataactgtgaatgccaaaccgattccttcactccagtgtgtggggcagatggcatcacctacctgtctgcctgctttgctggctgcaacagcacgaatctcacgggctgtgcgtgcctcaccaccgtccctgctgagaacgcaaccgtggttcctggaaaatgccccagtcctgggtgccaagaggccttcctcactttcctctgtgtgatgtgtatctgcagcctgatcggtgccatggcacagacaccctcagtcatcatcctcatcaggacagtcagccctgaactcaagtcttacgctttgggagttctttttctcctccttcgtttgttgggcttcatccctccacccctcatcttcggggctggcatcgactccacctgcctgttctggagcacgttctgtggggagcaaggcgcctgcgtcctctacgacaatgtggtctaccgatacctgtatgtcagcatcgccatcgcgctcaaatccttcgccttcatcctgtgatgaggaccaaagaggtgacttatggtcaggagtactccaaacagctctcagagtaggcatctttcctgggtctctaaagagtcatgctgacctggtgtgcaaattcccttccacccatccctctacctcctctggggatggcttgccgacatgctttagaaactcccctcttgggaatgctcctctgactgagggctccaacagctttaatgaaatcagccgagagggtaaaaaccaacctgttgcatagaatggaggggggaaaaagcacatactcaatagatttttgagtgtggtactctgtatttttgcagcgtttattttccaaatgagcagtttagaaatatgtgatgtaaagtacatactgtacgtttgctgaaaattatattaaaagcactattttaa

SEQ ID NO: 7545 - DNA, 636 bp, Homo Sapiens
  XM_941125
gaactacagaacatggccaagtccaagaaccacaccacacacaaccagtcccgaaaatggcacagaaatggtatcaagaaaccccgatcacaaagatacgaatctcttaagggggtggaccccaagttcctgaggaacatgcgctttgccaagaagcacaacaaaaagggcctaaagaagatgcaggccaacaatgccaaggccatgagtgcacgtgccgaggctatcaaggccctcgtaaagcccaaggaggttaagcccaagatcccaaagggagtcagctgcaagctcgatcgacatgcctacgttgcccaccccaagcttgggaagcgtgctcttgcccgtattgccaaggggctcaggctgtgccggccaaaggccaaggccaaggccaaggatcaaaccaaggcccaggctgcagctccagcttcagttccagctcaggctcccaaaggtacccaggcccctacaaaggcttcagagtagatatctctgccaacatgaggacagaaggactggtgcgaccccccacccccacccctgggctaccatctgcatggggctggggtcctcctgtgctatttgtacaaataaacctgaggcaggaaaaaaaaaaaaaaagaaatacctaaaatc

SEQ ID NO: 7546 - DNA, 440 bp, Homo Sapiens
  XM_941267
atgaaggggatctgctcagacgccatccttgttctagctacctccatgtggatggcctttgcaattgacttcccccttcctatggcctctgaaagaggtcagctagacaaaacaatagttgaatgcctcaagaatgtaaataagtgctggtttttatcctacatcaagcccagtgaacctatttgtggcagtgaccaggttacctacagtagtgactgccatctgtgctccaacattctatttgaagggcttaacataactaaactgtatgatggacaatgtgaaaactcttgaacgtacgacaaagaattataaaacctactgaatctccagattgccaagtgaaacacaatggttgcctcttcaaatatatcccctttaattactaatggttggatcaaactcgttgatttatgtcttcaataaatgattcttagcag

SEQ ID NO: 7547 - DNA, 855 bp, Homo Sapiens
  XM_941298
atgcctcccacgcacgctttcttccctgaagggagacccaggctgcgctgggaccacttcaacctcacctacaggatcctctccttcccgcggaacctgctgagcccgcgggagacgcggcgggccctagctgccgccttccgcatgtggagcgacgtgtcccccttcagcttccgcgaggtggcccccgagcagcccagcgacctccggataggcttctacccgatcaaccacacggactgcctggtctccgcgctgcaccactgcttcgacggccccacgggggagctggcccacgccttcttccccccgcacggcggcatccacttcgacgacagcgagtactgggtcctgggccccacgcgctacagctggaagaaaggcgtgtggctcacggacctggtgcacgtggcggcccacgagatcggccacgcgctgggcctgatgcactcacaacacggccgggcgctcatgcacctgaacgccacgctgcgcggctggaaggcgttgtcccaggacgagctgtgggggctgcaccggctctacggatgcctcgacaggctgttcgtgtgcgcgtcctgggcgcggaggggcttctgcgacgctcgccggcggctcatgaagaggctctgccccagcagctgcgacttctgctacggagacgccccgcccccctgcagctggtacaaggaccaggagcccctggagttctcctaccccggctacctggccctgggcgaggcgcacctgagcatcatcgccaacgccgtcaatgagggcacctacacctgcgtggtgcgccgccagcagcgcgtgctgaccacctactcctggcgagtccgtgtgcggggctga

SEQ ID NO: 7548 - DNA, 819 bp, Homo Sapiens
  XM_941341
acgccgacgatggggtcatggcgccccgaaccctcctcctgctgctctcggggaccctggccctggccgagacctgggcgggctcccactccatgaggtatttcagcaccgccgtttcctggccgggccgcggggagcccagcttcattgccgtgggctacgtggacgacacgcagttcgtgcgggtcgacagtgacgccgtgagtctgaggatgaagacgcgggcgcggtgggtggagcaggaggggccggagtattgggacctacagacactgggcgccaaggcccaggcacagactgaccgagtgaacctgcggaccctgctccgctactacaaccagagcgaggcggaccccccccaagacacacgtgacccacccccctctctgaacatgaggcataacgaggtcctgggttctgggcttctaccctgcggagatcacattgacctggcagcgggatggggaggaccagacccaggacatggagctcgtggagaccaggcccacaggggatggaaccttccagaagtgggcggttgtggtagtgccttctggagaggaacagagatacacatgccatgtgcagcacaaggggctgcccaagcccctcatcctgagatgggtcacacatttctggaaacttctcgaggttccaagactaggaggttcctctaggacctcatggccctgctaccttcctggcctctcacaggacgttttcttcccgcagatagaaaaggagggagctactctcaggctgcaatgtgagacagctgccttgtgtgggactgagaggcaagatttgttcatgccttcc

SEQ ID NO: 7549 - DNA, 2155 bp, Homo Sapiens
  XM_941392
gtgccactgcactccagcctggccacacagcgagactctgtctcaagaataaaataagaacacttgaactgaggggtgggtaatgagggatgggtttgggggctttctagagtttcagccagagttagtaggtggctgtactccaataaggaggaattgtaagtacagaggaagactgaggaagttgtgcctggtaaaaagaggcagaaataagaggggaaagcagcttagcatctttggagcagccagtccttggaggagatttctgaaaactcgaaactttcctatttccgctttcccttgccttccagatgccgcatcctcgaaggtaccactcctcagagcgaggcagccgggggagttaccgtgaacactatcggagccgaaagcataagcgacgaagaagtcgctcctggtcaagtagtagtgaccggacacgacggcgtcggcgagaggacagctaccatgtccgttctcgaagcagttatgatgatcgttcgtccgaccggagggtgtatgaccggcgatactgtggcagctacagacgcaacgattatagccgggatcggggagatgcctactatgacacagactatcggcattcctatgaatatcagcgggagaacagcagttaccgcagccagcgcagcagccggaggaagcacagacggcggaggaggcgcagccggacatttagccgctcatcttcgcagcacagcagccggagagccaagagtgtagaggacgacgctgagggccacctcatctaccacgtcggggactggctacaagagcgatatgaaatcgttagcaccttaggagaggggaccttcggccgagttgtacaatgtgttgaccatcgcaggggtggggctcgagttgccctgaagatcattaagaatgtggagaagtacaaggaagcagctcgacttgagatcaacgtgctagagaaaatcaatgagaaagaccctgacaacaagaacctctgtgtccagatgtttgactggtttgactaccatggccacatgtgtatctcctttgagcttctgggccttagcaccttcgatttcctcaaagacaacaactacctgccctaccccatccaccaagtgcgccacatggccttccagctgtgccaggctgtcaagttcctccatgataacaagctgacacatacagacctcaagcctgaaaatattctgtttgtgaattcagactatgagctcacctacaacctagagaagaagcgagatgagcgcagtgtgaagagcacagctgtgcgggtggtagactttggcagtgccacctttgaccatgagcaccatagcaccattgtctccactcgccattaccgagcaccagaagtcatccttgagttgggctggtcacagccttgtgatgtgtggagtataggctgcatcatctttgaatactatgtgggattcaccctcttccagacccatgacaacagagagcatctagccatgatggaaaggatcttgggtcctatcccttcccggatgatccgaaagacaagaaagcagaaatatttttaccggggtcgcctggattgggatgagaacacatcagctgggcgctatgttcgtgagaactgcaaaccgctgcggcggtatctgacctcagaggcagaggaacaccaccagctcttcgatctgattgaaagcatgctagagtatgaaccagctaagcggctgaccttgggtgaagcccttcagcatcctttcttcgcccgccttcgggctgagccgcccaacaagttgtgggactccagtcgggatatcagtcggtgacgatcaggccctgggcccccctgcatcttttatagcagtgggtgtccagtccaggacactggtgcttttttatacaagagaacgagccagagttcactccttcctcctggctctctatatacctgtgaatatgtgaaatagtgtaaatatgaaagaacttgtacctatcacttcaacccctgccttgtacataatactattccatccacacagtttccaccctcacctgccccctcatacggagttggatgggggccgagtgaggtaaccaggtggcatctaccccatgttttataaggaattttgtacagtctttgtgaaataaaataacgtgcttcatttga

SEQ ID NO: 7550 - DNA, 585 bp, Homo Sapiens
  XM_941396
acacagcatatggacccttttcacaacatggcgccgaaagcgaagaaggaagctcctgcccctcctaaagctgaagccaaagcgaaggctttaaaggccaagaaggcagtgttgaaaggtgtccacagccacaaaaagaagaagatccgcacgtcacccaccttccggcggccgaagacactgcgactccggagacagcccaaatatcctcggaagagcgctcccaggagaaacaagcttgaccactatgctatcatcaagtttccgctgaccactgagtctgccatgaagaagatagaagacaacaacacacttgtgttcattgtggatgttaaagccaacaagcaccagattaaacaggctgtgaagaagctctatgacattgatgtggccaaggtcaacatcctgattcggcctgatggagagaagaaggcatatgttcgactggctcctgattacgatgctttggatgttgccaacaaaattgggatcatctaaactgagtccagctgcctaattctgaatatatatatatatatatcttttcaccataaaaaaaaaaacacagcatatacacacaaaaaa

SEQ ID NO: 7551 - DNA, 4157 bp, Homo Sapiens
  XM_941411
atgaaagcacaaaggattggccccgcatcgccgctgcgggacagccacgctgggaggcgtcgctcgggagcccggccgtccctcttcagcaccaagaaggaccgagccccgcgggaggtgcagaggctgtggcagaggccgtggctaaggaccgcgggcctgggggctggctttgtgctcaccgcactcctgctctggagcagcttgggggccgacgacggggtcgcagaggtcctggcccgccgtggcgaggtcgtggcagggagattcatcgaggtgccctgctctgaggactacgacagtcaccgcaggttcgaaggctgcactccccgaaagtgcggcagaggtgtcaccgatgtcgtcatcaccagggaggaagcggagcggattcgcagcgtagctgaaaaggggctctccctgggaggatctgacggaggggcatccattctggacttgcactcaggggccctgtctgtcgggaagcactttgtgaacctgtacagatacttcggggataaaatacagaacatcttctcagaggaggacttccggttataccgggaggtgcggcagaaggtccagctcaccattgctgaggcttttggcatcagcgcatcctcgctgcatctgaccaagcccaccttcttctcccgcataaacagcacggaagcgcggacggcgcacgacgagtactggcatgcgcacgtggacaaggtgacctacggctccttcgactacacctcgctgctgtacctctccaactacctggaggacttcggcggagggcggttcatgttcatggaggagggtgccaacaagacggtggagccgagagctggtcgcgtctccttcttcacctcggggtccgagaacctacaccgcgtggagaaggtccactggggcacccgttacgccatcaccatcgccttcagctgcaaccccgaccatggcatcgaggacccagcgttcccgtagccagcagccgggccaaggtaacttcaggagggcccgtgtggaggcagccgcgccagtcgtgcacccacccccacgtccacccgctcctgttgcacagagtgccttaggaattctctgattttgatttgctgacgtgttaatcttttcatctgtgagtaaatgaagggaaccagcttttcacttctccagcatcatgtgtgcttgggctgtaggcctgggagcctgaggtggaggccaggaaagggacccagcaggacggggcacaagtccccatctgtgaatggacgggactcatccacccaggttcagcaaccccccgggactcgtccaggttcagcaaccccccggcccatcaaagactggctaaagcatcagccataaatggggacaaacgtggggccagcagcttctgttcggggtctcggcatcagcaaaccgcagcagctttggagaagggtccgtgagtggcggctctggaggcagcaacggggtcctttggggtgggtgggagttctgctggattcaggtggaggtgaacatctgccgttcccacagccctgcgtgcacccccaatgctgctggcccacaaatcaccgtgggccacggccccaccacaccaggcttggccctgtcagcggccagcatcccaagggccagggtccgagtgtcctcaccaaggaggctcttggcgtcgctgtgccggctcccatgggccttctgctgggtcgagggtaggtctcctcctccccctttgccctggcattaaactgatggtcaggctgggcgcggtggctcacacctgtaatctcagcactgcgggaggccgaggcaggaggatcacttgaggtcaggagttcaagaccagcctggccaacatggcgaaaccctgtctctactaaaaacacaaaaacaaattaatcccagctactggggaggctgaggcaggagaatcgcttgaacccagggggcagaagttgcagtgagccgagatcgtgccactacactccagcctgggtgacagagtgagactccatcttaaaaatataaaaataaagtggtggtcagaggagccccgaatagaccagttgtggagaggcctgggtggggtggctggcagggagggcaggccaagcccagtttctgcccacagtcacctcgaggtgactgtccagggctttgggcaccttcccgggagggggacggccgcccaccctgagtggtgttggaagctgggctctcctggatgccctgacccagctgcctggggagagccctgggcccctcctccctcagcacctcctccctcagcccctcctgcctcggtccctcctcccttagcctgtctggcatagatccatgttccctagcccctggcacaggtgcctctgactggaggaggccccacctgtggcccgggagctgctctgggggttgataaagggcagcattattgggtcctgggaaggagcgggcgtgaggccagctgaggcatggtgacccctgggaaggagcgggcgtgaggccagctgaggcatggtgacccctgggaaggagcgggcgtgaggccagctgaggcatggtgacccctgggaaggagcgggcgtgaggccagctgaggcatggtgacccctgggaaggagcgggcgtgaggccagctgaggcatggtgacccctgggtacgggggacttgggggccgcaccttggtttgcccagggcccctcctgcaccacgggccacatgcggaggacggcgtgggataggctccctgggtccacagcttctgcccgtgtatggggaaccctccttggtcagggctgcaggctctgggcagatggggcaggaaccctgaggctcccgcgccctcccatggcctctgatgtgggacactggagcgaggcacgattctgaaggactccatggatctgggaggatgaggcccacctccggttggtggccaaagccgtccttgcggggccggctgcttcacggacactctccgggtcgggctggtgggccccatcgtgggtgggaagtcgcctgagcctgggccgcccttgagcttctcccagtcttgactttccagagggtccgtggctgtggtcatggtcggggcaggtggaaaatgctgcatggaaacctgatcctgtcaccttggagtaaatgatgatgtcgccggcttctcgccacgtctaaaggataaatgcatttgaagaaagtgggtgttgggtttgttatgggttaaagtgcttttgaaataagtaaattattagtttgattttcattcttggctacttacactattcatgataatcacagagatacttggacaaagaaatatatttgggcaaaagcaagaatttccttctttttttttttgagacggagtctaactctgtcgcccaggctggagtgcagtggcgcaatctcggctcactgcaaggtccacctcctgggttcccaccattctcctgcctcaacctcccgagtagctgggactacaggcgcccgccaccatgcccggctaattttttttgtatttttagtagagatgggatttcaccgtgttagccagaatgaagaatttccttctgaagtgggaacatatggctcatgctggtaatcccagcactttgggaggccaaggtaggaagatcacttgagcccaggagttggagacccatctgtgcaacatagtgagacgctgtctgtacaagaaacttttaaaaaatgtagctgggcgtggcagtgtgctcctgtggtcccagctactcggagctgaggcaggacgactgcttgagcccaggaggtcgaggctacagtgagctgtgacggctccactgcattccagcctgggagacagcaagatactgtctcaaaaaaaaatttatcattgaagcctgggcattttaaaaaaataaaaaggtgggaaaatacgtgggcacagcagtgaatcctcacaccctgggctttgcccaagaagtgctcgtgaacctgatgaaagtgtcgggtgtggccgacgtgaggctgttccaggagccacgaggggtgattggttccgctagaaggttccagggaggaactggagtctcaggtgtgtcctctgatgagtgatctatttttaagtaaaagtgtttcattaaagtcaaagatgattattcctttcaaaataaagaatctagga

SEQ ID NO: 7552 - DNA, 5416 bp, Homo Sapiens
  XM_941446
agcgagtgcccagggtgaatcaatggaaaccccctcacgaagccggggaaacacttcagccgcagccaaatagcattgattattttccttcacttccctcaccgccgtgaatttatttatttatttttttccgtctccgtccctgacgccccggagcgagcgctggagggagggaggaggaggggaaaaaagaggaatcaacacatcggagaagtcccttccaagagccgccccctcccctccccgcctcgcgctgctcggtggccgcggttcgactcccgtccctgcttccagctgaggtggtactggctgtcacgctgacatgagcccccagcactcctccgtctaccatggccacccttaactcagcctctaccactggtaccaccccctcccctgggcacaatgccccgtccctgccttcggacaccttctcctccagcaccccctctgatcctgtcaccaaagatccccctgctgcctcctccacctctgagaacatgaggtcctcagagccagggggacagctcctggagtcgggctgtggcctcgtcccaccaaaggagattggggagccccaggaagggcctgactgtggtcacttcccaccaaatgacccaggggtggaaaaggacaaggagcaggaggaggaagaagaagggctccctcccatggacctaagcaaccacttattcttcacagctggaggtgaggcctacctagtggccaagctgtccctgccaggtggcagtgaactcctgttaccaaagggcttcccctggggtgaggcgggcatcaaggaagagcccagtctgcccttccttgcctacccacccccctcacacctcactgcccttcacatccaacatggctttgacccaatccaaggctttagctcttctgaccaaattctgtcccatgatacctcagcaccatctccggctgcctgtgaggaaaggcatggagctttctggagctaccagctggctccaaatccacccggagatcccaaagatggccccatggggaacagcgggggcaaccacgtggcggtcttctggctctgccttctgtgccgcctgggtttcagcaagccccaggcctttatggatcacacacagtctcatggggtgaagctaacccctgcccaatatcagggcctgtcaggtagcccagctgtactccaggagggagatgaaggctgcaaggccctcataagctttctggagccaaaactccctgctcgcccctcttctgacataccccttgacaacagcagcacagtgaacatggaggcgaatgtggcccagacagaggatggcccccctgaggcagaagtccaggcccttatcctcctggatgaagaagttatggccctcagcccaccctctccacccacagccacctgggaccccagcccaacccaagccaaagaatcgccagtagcagcaggcgaggcagggccagattggttccctgaggggcaagaagaggatggagggctctgccccccactcaaccaaagctcacccacctccaaggaggggggcactctccctgccccagtgggctcccccgaagaccccagtgacccaccccagccctatcgcctagctgatgactacaccccagcccctgcagccttccagggcctcagcctgtccagccacatgtccctgctccactcacgcaactcctgcaagacactcaagtgtcccaagtgcaactggcactacaagtaccagcagaccctggatgtgcacatgcgagagaagcaccctgagagcaacagtcactgcagctactgcagtgctgggggcgcccacccccgccttgctcgtggagagagctacaactgtggctacaaaccctaccgctgtgacgtctgcaactactctacaaccaccaaaggcaacctcagcatccatatgcagtctgacaagcacctggccaacctacagggcttccaggcgggccctggtgggcagggaagtccaccagaggcatcactcccaccctccgcgggagacaaagagcctaagaccaaatcatcctggcagtgcaaggtgtgcagctacgagacaaacatctcccgtaacctgcgcatccatatgacctctgagaagcacatgcagaatgtcctaatgctgcaccaggggctgccgctgggcctgccacctggattgatggggccaggccctcctcccccaccaggggctacccccactagcccccctgaactcttccagtactttgggccccaggccctagggcagcctcagactcccttggctggcccggggctgaggccagacaagcccctggaagcccagctacttctcaatggtttccaccacgtaggagcacctgcccgcaagttccccacatccgcccctggaagcctatcccctgatgcccacctgcctccaagtcagctcctgggttcctcatctgacagcctgcccacctcaccacccccagacgacagcctgtccctgaaggtgttccgctgcctagtgtgccaggccttcagcacagacagcctggagctgctgctctaccactgcagcataggccggagcctcccggaagctgaatggaaggaggtggctggtgacacccaccgctgcaagctttgctgctatggcacccagctcaaggccaacttccaactccacctcaagactgacaaacatgctcagaagtaccagctggcagcccacctgcgggaggggggtggagccatgggcaccccttccccagcatccctgggagatggggctccttatgggtctgtctccccactacacctgcgctgcaacatctgtgactttgagtccaacagcaaggagaagatgcagctgcatgccaggggtgcagcccacgaagaaaacagccaattctataaaaggacaggaactggactcttaataaaatgatctcttaggccctaccagttctaatactgtaattttccctctatcttctgtgtgggtgtttctttttgttggcttttcatactctcctacctgctgattgagccatccattttctccttcattgactggctgcttgtcctgcttcctctgtcctatgtcctcccttccctgatgccacacctctttaagctgactctccccccatcctacacagggaaggctcctgtcacccccttagctgagccacccacccctgagaaagatgcccagaacaagacagaacaattgggtgagttttccctcccttccccccagtcctcctaccttctgagacgctcacgggaccttgcagtaatccaggagcccagcaatgtctgtgctcaaggagcaaaactgattaaagaaagggctcatcagggggaagggaggctgagccacgagaggctaggcacttccgccctctttgagaactcagacctgaccatcctactgacccggagtcagcccttgccaagcctcacctatctactgagtttcctgccctttctctagtgcccaactccctaccctggaagctctctgctacaaatcatcttgagggctgtcagggttccttaatctcctcttctttcatcctcagcttcagaagagacagaaaacaagactggcccttccagagacagtgccaaccagaccacggtcagaattggggtaactgggaagagctgaagtgggggcctggctttactgagatctgctcatattctaaaggcagacgtaattttgtcatgctttgacttatttcactcagaatagcacagttaagaaattccacccagatccagttccacatgttcagcactttcgggggcagagctggcccagcagggtcaagcacagagggagatgataggagggagacagcaggaacttgagggaaagatgaataaaggaattgtgctgagagtaggaaagagtgggggtacatgctggaaggaggggaggagaaaggcaaaagcaaacaaccagctactgcccagctctttatcccttagttaggagcagaaagacaagacaccggtgttcctaccctacaaaacgccctgagcctggatggaactgtcctggcatcctcttactaagggtaggggcaccaaccaaatgattcacactgacagcatgtgccacaaatctctaaatccccaggactcagacctaggcagcacccaggaatggcagctctgtgttctgaggggattcccagcctctggtttgagatgccatcctgtgcctcacagctctccaaactggactacaatatgtaacatttattgttattgcaatacgcagtgttactgcattactgcaagctgaagtaatgccttatgtcctcagcatcttttcttcctaactcctgctcccgccaacagacctcttccagatgtctgctccaggggctaggtgcgttaagatgagcatctggatccccttcctttacagtcatcccctccctgacacacaggcctgtgccactggtgccagcctggatgcaggctgggtaggtctggcagtcaggtgatggtggggcctctggcagcctcacccctctggaagtgtggctgagaatgtgctgagagggctgggccagaattttcctgggccactgggggagctgtggtgtttattcacattaggaaaaagaagaaggaaaaagaaagatggaaaataaggtgggagctgctgagcctgagggaggatgagctggcttctgagcagacaggtagggcccctttccaggtgatggttcacagaggcagagtgggcagggacaagggagcctctgggtccagaaaatgcccagaggaaatggaaccatttcacagagaagacacgacaggataggataggtaagagaagaaaactaaatccaaggtgggggcagtaggtacagagccatctgttagctggagagttgaggcaggcagcaaagactgggaaagacacaccaagaaaaggcagagaggccaggatggtggaagagggccagacaaagaaggagtgcaaggtagcggcctaagctaggcctttgtcccaatccaagggaaagtggggaggagccagctctcaggactgtggctggaggctgggtctgctataatgccttcctatctggctagttcctcttcaattaggagtgagaggccaagcgtggtggctcacgcctgtaatcccagcactttgggaagccaagatgagtagatcacctggcatcaggagttcaagaccaacctggccaatgtggcaaaaccctgtctccactaaaaaatacaaaaattagctgggcgtggttgcacacgcctgtaatcccagctgcttgggaggctgagggcaggagaattgcttgaacctggaaggcggaggttgcagtgagccgagatcacgtcactgcactccggcctgggtgacagagccagact

SEQ ID NO: 7553 - DNA, 1361 bp, Homo Sapiens
  XM_941466
atggcgccggcctgcctcacgggcagggtgtctctcctctgcagcgggctgacgcacgaggcacacaggaaggaggtggagcaggtgtatctgcgctgtgcggcgggtgccgtggagtggatgtacccaacaggtgctctcatcgttaacctgcggcccaacaccttctcgcctgcccggcacctgaccgtgtgcatcaggtccttcacggactcctcgggggccaatatttatttggaaaaaactggagaactgagactgctggtaccagacggggacggcaggcccggccgggtgcagtgttttggcctggagcagggcggcctgttcgtggaggccacgccgcagcaggatatcggccggaggaccacaggcttccagtacgagctggttaggaggcacagggcgtcggacctgcacgagctgtctgcgccgtgccgtccctgcagtgacaccgaggtgctcctagccgtctgcaccagcgacttcgccgttcgaggctccatccagcaagttacccacgagcctgagcggcaggactcagccatccacctgcgcgtgagcagactctatcggcagaaaagcagggtcttcgagccggtgcccgagggtgacggccactggcaggggcgcgtcaggacgctgctggagtgtggcgtgcggccggggcatggcgacttcctcttcactggccacatgcacttcggggaggcgcggctcggctgtgccccacgcttcaaggacttccagaggatgtacagggatgcccaggagagggggctgaacccttgtgaggttggcacggactgactccgtgggccgctgcccttcctctcctgatgagtcacaggctgcggtgggcgctgcggtcctggtggggccgtgcggtgagggccgcgcgctgggagccgcgtgccctgggcccaggcctgaccctggtaccgaagctgtggacgttctcgccacactcaaccccatgagcttccagccaaggatgccctggccgattggaaatgctgtaaaatgcaaactaagttattatatttttttttggtaaaaaagaaatgtccataggaaacaaattcccgtgtcttaaaacgccttggtgtgccgtctgatactgttctctaaagacgttaggagtcacggcatctggcctgcggttgggtgaagcactggccgttgggcacagtggatgtgtgaaaaggtgccattcagagttgttattctcatgacggaagttttggagccaaataatacgttttttattttcattttatttttaaaggatgagctttggtccttttcaggccgccggttgtttccgttcccgagaataaagacgaggatccgaccagcca

SEQ ID NO: 7554 - DNA, 4647 bp, Homo Sapiens
  XM_941546
atgttcagctgtgactccagtgccatgctgtggtggaaatgtgagcaccactctctgtacggagctgcccggtactggctggctctgaaggatggacatggcacagcaatctcaaatgcatctgatgtctggaagaaaggaggctcagaggaaagcctttgtgaccagccttatcatgagatctataccagagatgggaactcttatgggagaccttgtgaatttccattcttaattgatgggacctggcatcatgattgcattcttgatgaagatcatagtgggccatggtgtgccaccaccttaaattatgaatatgaccgaaagtggggcatctgcttaaagcctgaaaacggttgtgaagataattgggaaaagaacgagcagtttggaagttgctaccaatttaatactcagacggctctttcttggaaagaagcttatgtttcatgtcagaatcaaggagctgatttactgagcatcaacagtgctgctgaattaacttaccttaaagaaaaagaaggcattgctaagattttctggattggtttaaatcagctatactctgctagaggctgggaatggtcagaccacaaaccattaaactttctcaactgggatccagacaggcccagtgcacctactataggtggctccagctgtgcaagaatggatgctgagtctggtctgtggcagagcttttcctgtgaagctcaactgccctatgtctgcaggaaaccattaaataatacagtggagttaacagatgtctggacatactcagatacccgctgtgatgcaggctggctgccaaataatggattttgctatctgctggtaaatgaaagtaattcctgggataaggcacatgcgaaatgcaaagccttcagtagtgacctaatcagcattcattctctagcagatgtggaggtggttgtcacaaaactccataatgaggatatcaaagaagaagtgtggataggccttaagaacataaacataccaactttatttcagtggtcagatggtactgaagttactctaacatattgggatgagaatgagccaaatgttccctacaataagacgcccaactgtgtttcctacttaggagagctaggtcagtggaaagtccaatcatgtgaggagaaactaaaatatgtatgcaagagaaagggagaaaaactgaatgacgcaagttctgataagatgtgtcctccagatgagggctggaagagacatggagaaacctgttacaagatttatgaggatgaggtcccttttggaacaaactgcaatctgactatcactagcagatttgagcaagaatacctaaatgatttgatgaaaaagtatgataaatctctaagaaaatacttctggactggcctgagagatgtagattcttgtggagagtataactgggcaactgttggtggaagaaggcgggctgtaaccttttccaactggaattttcttgagccagcttccccgggcggctgcgtggctatgtctactggaaagtctgttggaaagtgggaggtgaaggactgcagaagcttcaaagcactttcaatttgcaagaaaatgagtggaccccttgggcctgaagaagcatcccctaagcctgatgacccctgtcctgaaggctggcagagtttccccgcaagtctttcttgttataaggtattccatgcagaaagaattgtaagaaagaggaactgggaagaagctgaacgattctgccaagcccttggagcacacctttctagcttcagccatgtggatgaaataaaggaatttcttcactttttaacggaccagttcagtggccagcattggctgtggattggtttgaataaaaggagcccagatttacaaggatcctggcaatggagtgatcgtacaccagtgtctactattatcatgccaaatgagtttcagcaggattatgacatcagagactgtgctgctgtcaaggtatttcataggccatggcgaagaggctggcatttctatgatgatagagaatttatttatttgaggccttttgcttgtgatacaaaacttgaatgggtgtgccaaattccaaaaggccgtactccaaaaacaccagactggtacaatccagaccgtgctggaattcatggacctccacttataattgaaggaagtgaatattggtttgttgctgatcttcacctaaactatgaagaagccgtcctgtactgtgccagcaatcacagctttcttgcgactataacatcttttgtgggactaaaagccatcaaaaacaaaatagcaaatatatctggtgatggacagaagtggtggataagaattagcgagtggccaatagatgatcattttacatactcacgatatccatggcaccgctttcctgtgacatttggagaggaatgcttgtacatgtctgccaagacttggcttatcgacttaggtaaaccaacagactgtagtaccaagttgcccttcatctgtgaaaaatataatgtttcttcgttagagaaatacagcccagattctgcagctaaagtgcaatgttctgagcaatggattccttttcagaataagtgttttctaaagatcaaacccgtgtctctcacattttctcaagcaagcgatacctgtcactcctatggtggcacccttccttcagtgttgagccagattgaacaagactttattacatccttgcttccggatatggaagctactttatggattggtttgcgctggactgcctatgaaaagataaacaaatggacagataacagagagctgacgtacagtaactttcacccattattggttagtgggaggctgagaataccagaaaatttttttgaggaagagtctcgctaccactgtgccctaatactcaacctccaaaaatcaccgtttactgggacgtggaattttacatcctgcagtgaacgccactttgtgtctctctgtcagaaatattcagaagttaaaagcagacagacgttgcagaatgcttcagaaactgtaaagtatctaaataatctgtacaaaataatcccaaagactctgacttggcacagtgctaaaagggagtgtctgaaaagtaacatgcagctggtgagcatcacggacccttaccagcaggcattcctcagtgtgcaggcgctccttcacaactcttccttatggatcggactcttcagtcaagatgatgaactcaactttggttggtcagatgggaaacgtcttcattttagtcgctgggctgaaactaatgggcaactcgaagactgtgtagtattagacactgatggattctggaaaacagttgattgcaatgacaatcaaccaggtgctatttgctactattcaggaaatgagactgaaaaagaggtcaaaccagttgacagtgttaaatgtccatctcctgttctaaatactccgtggataccatttcagaactgttgctacaatttcataataacaaagaataggcatatggcaacaacacaggatgaagttcatactaaatgccagaaactgaatccaaaatcacatattctgagtattcgagatgaaaaggagaataactttgttcttgagcaactgctgtacttcaattatatggcttcatgggtcatgttaggaataacttatagaaataattctcttatgtggtttgataagaccccactgtcatatacacattggagagcaggaagaccaactataaaaaatgagaagtttttggctggtttaagtactgacggcttctgggatattcaaacctttaaagttattgaagaagcagtttattttcaccagcacagcattcttgcttgtaaaattgaaatggttgactacaaagaagaacataatactacactgccacagtttatgccatatgaagatggtatttacagtgttattcaaaaaaaggtaacatggtatgaagcattaaacatgtgttctcaaagtggaggtcacttggcaagcgttcacaaccaaaatggccagctctttctggaagatattgtaaaacgtgatggatttccactatgggttgggctctcaagtcatgatggaagtgaatcaagttttgaatggtctgatggtagtacatttgactatatcccatggaaaggccaaacatctcctggaaattgtgttctcttggatccaaaaggaacttggaaacatgaaaaatgcaactctgttaaggatggtgctatttgttataaacctacaaaatctaaaaagctgtcccgtcttacatattcatcaagatgtccagcagcaaaagagaatgggtcacggtggatccagtacaagggtcactgttacaagtctgatcaggcattgcacagtttttcagaggccaaaaaattgtgttcaaaacatgatcactctgcaactatcgtttccataaaagatgaagatgagaataaatttgtgagcagactgatgagggaaaataataacattaccatgagagtttggcttggattatctcaacattctgttgaccagtcttggagttggttagatggatcagaagtgacatttgtcaaatgggaaaataaaagcaccgtttgcacctggcgggtttctcatcagttcgatatgcacaaggagtga

SEQ ID NO: 7555 - DNA, 424 bp, Homo Sapiens
  XM_941610
accgcctctccgccagaccgccgccgcgccgccatcatggacaccagccgtgtgcagcctatcaagctggccagggtcaccaaggtcctgggcaggaccggctctcagggacagtgcacgcaggtgcgcgtggaattcatggacgacacgagccgatccatcatccgcaatgtaaaaggccccgtgcgcgagggcgacgtgctcacccttttggagtcagagcgagaagcccggaggttgcgctgagcttgcttgctcgctgggtcttggatgtcgggttcgaccacttggccgatgggaatggtctgtcacagtctgctcctttttttttgtccgccacacggaattgagatgctcctttaaataaagcgtttgtgtttcaagttaaaaaaaaaaaccaaaaaaaaaaacccaaaaaacctaa

SEQ ID NO: 7556 - DNA, 675 bp, Homo Sapiens
  XM_941634
gctttcccaaggggcagccgaagatggcagaggtgcaggtcctggtgcttgatggtcgaggccatctcctgggccgcctggcgaccatcgtggctaaacaggtactgctgggccggaaggtggtggtcgtacgctgcaaaggcatcaacatttctggcaatttctacagaaacaagttgaagtacttggctttcctccgcaagcggatgaacaccaaccctttccgacgcccctaccacttccgggcccccagccccatcttctggctgactgtgcgaagtatgctgccccacaagaccaagcgaggccaggccgctctggaccgcctcaaggtgtttgactgcatcccaccgccttacgacaagaaaaagcggatggtggttcctgctgccctcaaggttgtgcgtctgaagcctacaagaaagtttgcctatctggggcacctggctcacgaggttggctggaagtaccacgcagtgacagccaccctggaggagaagaggaaagagaaagccaaaatccactaccggaagaagaaagagctcataagcctacggaaacaggccaagaggaacatggagaagaaaactgacaaatacacagaggtcctcaagacccacggactcctggtctgagcccaataaagactgttaaaaaaaaaaaaaaaaaaaaagg

SEQ ID NO: 7557 - DNA, 2672 bp, Homo Sapiens
  XM_941684
tgtccagccaatgtaatcagttaatacatatctaaggaaatttaattttggtcatactaatgttacatcagccctcaaaagaaaatgctggtagagatgactattaagaagaaattagatctttccaatgaatggtgtttcacagtaatagttgaagtctcagacaattcaagatcagccctgaaaatgggtacatccagattgacaattagaatcaaagtggaacagcagaagaacatgaacattgcagtcattctttcaactaatattaattccacacctaatatatgacagccactgtgttaggtcctcagagaatttataatctagtggaaagacaagacagataacagataatgagaatacaatattatgatgtcagcagaccccaggcataaaataagatgacttatagggttcgtttgacaatttgaggtaacataccatattttatcaattttaagaccatgagttgtaacaaacaccattatttttggaccatggagggggccggagggaaatgctgctacttaaactatgacacatagaatttttccacattgtattgaattctgctaagagcattagtgatgcaacattttttaaaataatattccactattatctttgggttttttttgcaagctgttggggtccattctatgagtttcaatgctggtgctttcttattgcaactcagaggtatcaatgaagggttttcagatcacaaccaggatttaaatcctttctttaaatgattagttgactgaaatgtcaagggtttgcagttgtctaatcatgccaccaggaataaccaggaagtttgcacatgttcaggctaagacaactacatcacaactaccttctggtgacagcattgtaagacaccatgattgtaagatgccattccagttttagaaatattggaaagatgtacatcttagatttggcaaaatatcatttattgctggcagctattaaaatatgtgttattaggagaatgtacaaagagcactgtgagcactgaggatagagcacctaactctcacaaaggaagtgatatttgggcagacagaagtcatgaggatgcatgaatgggtaagaaagggcagtttcgagctgcaactacatgtgtgggagagtggtaggaccggatgctgggccatgtcaagaagagtttcatgtgctcaactaaaaaatttttgaatcttattatttgggtgatagacaaagttttggggtcagggagtgaccctgatgatataatttggctatatcaaatctcatgttgaaatctgatccccaatattgatggtggggtctggtgggaggtgattggattacggggacaagtccctcatgaatggcttggtgccattgtctgaggattgagtgaattctcactctttgtttctgcaaggtctggttgttaaaaagagcctgggacctttctcccgtttccctcttgcttcctctctcgtcatctgacataccactctctttccccttccaccatcattggaagcttccaaaagcagaggctcgctctttccttgcctaacgcagccatggcttgtggtcccaagaagcatctgaagtgagtagcagctccaaagcactggatgctggataaattgaccagtatgtttgctccttgtccatccaccagtccccacaagttgagagtgtcttcccctcatcattttcctaaggaacagacttaagtatgccctggaaggagatgaagtaaagaagatttgcatgcagcggtttattaaaattgatggcaaggtctaaactgatataacctaccctgctggattcatggaggccatcagcattgacaagacagaagagaatttctctctgatctatgacaccaagagtctctttgctgtacatcatattacacctgaggaggccaagtacaagttgtgcaaagtgagaaaaatctttctgggaacaaaaggaatccctcatctggtgactcatgatggtcgcaccatccgctacactgatccccttatcaaggtgaatgataccattcagattgatttggagactggcaagattactgatttcatcaaattcgacactggtcacctgtgtatggtgactggaggtgctaacctgggaagaattggtgtgatcaccaacagagagaggcaccctggatcttttgacattgttcacatggaagatgccaatggcaacagctttgccactcaactttccaacatttttgttattggcaagggcaacaaactatggatttctcttccctgaggaaagggtatccgcctcaccattgctgaagagagagacaaaagactgccaaacagagcagtgggtgaaatggtcccagggtgacatgttagatctttgtacgtaattgaaaataatgtggcaagattaatagcaaaaaaagaaaaaaaaatcagagtcttatgccaggcatgcatcttgtacagcctgcagaaccatgcgccaagtaaacctctttttctttttttttcttttttttttttttttttgagacagagtctctccctgttgcccaggctgaagtacaatggcgctatcttggctcactgcaacctccacctcccaggttcaagtgattctcctgcctcagcctcccaagtagctgggattacaggcacccgccacca

SEQ ID NO: 7558 - DNA, 402 bp, Homo Sapiens
  XM_941748
atgggccatagtagtgctatacaattcgtttttgaattgattttggaatatactttgtgctacaaaacttctgattttctgcagaaacaggaaattctggatctcttttcttcagtactctatgaatgtgttacccaggagaccccagagatgttgcctgcatacatagcaatggatcaggctataagaagacttgggagaagagaaatgtctgagacttctgaactttggcagataaagttggtgttagagtttttcagctcccgaagccatcaggagcggctgcagaaccaccctaagcgggggctctttatgaactcggaattcctccctgttgtgaagtgcaccattgataataccctggaccagtggctacaaggtaatagtagcattgtagcatag

SEQ ID NO: 7559 - DNA, 3033 bp, Homo Sapiens
  XM_941810
atggcctgggccgcctccccgactccatcattgctgtcattcccggcctcaagcctccaccgcccccacacgtgccgccacagggagcggcccgatcaaggcgtgacgctccgaagggtggggcctcacttattcccctatttaaaggggaaagaggccgcggcgccggccccaggacccgacccggccccaggagagtgtgctcgttctgttcacggagctggccgcgttagcgacgtcctcgagtccgcggcgggcacgatgcagctcttggtgagggtaccctctcttccggagcggggcgagctggactgcaacatctgctaccgtcctttcaacctcgggtgccgcgcgccccgccgcctgcccggaacggcgcgcgcccgctgcggccacacgatctgcaccgcctgcctccgcgagctggcggcgcgcggggacggcggcggggcggccgcgcgcgtggtgcgcctgcgccgcgtggtcacgtgccccttctgccgcgcgccctcgcagctccctcgcggcggcctcacggagatggctcttgactcggacttgtggtcgcgattggaggaaaaagcgcgggccaagtgcgaacgagatgaggctgggaacccggccaaggaaagcagcgacgctgacggagaggcggaggaagaaggggagagcgagaagggggcggggcctaggagtgctgggtggcgcgcgctccggcggctctgggacagggtcctggggcctgcgcggcgctggcggcgtccgctgcctagcaacgtgctctactgtgcggagatcaaggacattggccacctgacccgttgcacgttgtaaccgaggaactcggaagctacagccgaaggaaggtgggagctgcagcctcgcgggggctgatgtcaagactactctctctcagatcccaggattggcatgtgatgagagagatgagccgaaggcaggagggaacgccctgggaggtgttgatgctgagttggggaggctcctagacgaactcgcccccatctactgactgtgccagtcttacattttcaggatggagtggccaagggatgatataaacaaagcctacgttaccgtgggaagaagacagactgttttcttagctgggacgttggcttttgtccagggtggctctggtgtgtgggagcaacaggtcccattttagcaattctttgtcaatggtttgaattttttttttttttaagatggaacgggagagaagaggctaattttcgcgtcatgttaatctcacttctctggcatgtaagggtgctggtatgcctgctgtctccccactcccagttctgtgttccagaaattgagatggctccctgcctgtgactatgattaggagccttgcttcatttcagaatctcccttcaacctgctagggcaggtatcagaaattccaaagggcatttatgtgaggcacctaattagagcctatcaaagtaggaagggagagccatttgaaaggcatcatatttcaaacttttgctattatctgtgttatctttacagtcacgggaacacactagcgctactgaaaagatacttatacaattttaagtgtctttaaaatttgtgtcccataatgggacatcacctgttgtatatatgccatgtattctattttagaatcctgtatattatgaccataaagtcatagtcaaggaccagcagtgttggtgtactgtcaacggaagtgcacagtctcactctaggatcccactccagacttcctgaatcagactctggcagggttttttgtttttttgtttttgttttgagccagagtctcactgtgtcgcccaggctggagtgcagtggcgtgatctcggctcactgcagcctccgcctcccaggttcaagcgattctcctgcctcatcctccggagtagctgggattacaggcgcctgccaccacacctggctcatttttgtatttttagtagagatggggtttcgccatgtttgtcaggctggtctcaaaactcctgacctcaggtgatggcgcccaccttggcctcccaaagtgctgggattataggagtgagccaccgcgccgggccagactctggcattttaacaatcccaggtgatgtgtgtgcatgtgaaaatttaagtaccattggtctagatcctacactctttaggatatcaccatctgtaggtagaatatttaaagcataataggtatgactgatagattattttatccaaagttcttttttttttttttgagatggagtcttgctctgttgcccagactggagtgcagtggcgtgatctcggctcactgcaagctctgcctcctgggttcacgccattctcctgcctcagcctcccaagtagctggggctacaggcacccaccaccacgcctggctaatttttttgtatttttagtagagatggggtttcaccgtgttagccaggatggtctcgatctcctgacctcatgatccgcctgcctcggcctcccaaagtgctaggattacaggcgtgagccaccacgcccggccccaaagttctaaagtaacattctattgctaaagaaatcctaacctactatgtaacatttttctcttagttaaaaatgtgaacttattattaacctcaattttttagaggcctccaatctttttaaaatataaatatttttgattgacaaatcataattatacacttatgggggtataaacctcaatttttgtaaccctattttggcattttcctgtccttacatctcagcttaaatgctccctcttttgggaggcctttttctgccttcaacatagtagagccttttcctccacccctctgtaacataatgccctgttttatttttactgcttttattttcatgctttgtgggtgtccccactggagtgtaagccctatgggagcaagggctgacctgtgactgttttatctccagggccaacagcagtgttactgtatagtatgtactcaataaatatttgttggctttatctcttattttttaata

SEQ ID NO: 7560 - DNA, 3983 bp, Homo Sapiens
  XM_941876
atgaccgttttcttgtttctgcagttcttggccaggctgactgagagatttgtgctgggagtggatatgttcgtggagacactgtggaaagtctggaccgagctcttggatgttcttggacttgacgtctccaacctgtcccagtatttcagcccagcctcggtgtccagcagcccggcccgcgcgctcctgctggtcggcgtcgtcctcctggcctactggttcttgtccctgaccctgggcttcactttcagcgtcctgcacgtggtgttcggccgcttcttctggatcgtgcgggtcgtcctgttttccatgtcctgcgtgtacatcctgcacaagtacgagggcgagccggagaacgcggtgctgccgctgtgcttcgtggtggccgtctacttcatgaccgggcccatgggcttctactggcgaagcagtcccagcggccccagcaaccccagcaaccccagcgtggaggagaagctggagcacctggagaagcaggtcagactgctcaacatccgtctcaaccgggtgctcgagagcctggaccgctccaaggacaagtgaaggtcagccggccgggcgggtccacagttaccagcacgctgtctcagaaaacgaaaacggaggaaaaaaaccccaaaccccaaacaatcttaataaacacgactgagcaagaaagtggcgctgtgtagggctatttccacccacccggcagctcttaggacacattcccagaagagcggaaagatcattgacgtggaactacacacgaagtgtaattagtgggggaaaaaatattttttaaacaaaggatataaccatatttagttgtacagtaagagaaatttatctgtgcatagagcataaagttaattttttcaagcatttaaatacatcttttgtaaggttttttaataaaggcagattgagtcaagtttattaaaactttacatggaggggaagaatatgctaatttgacatttgagaaaagtttaaatgcgagcgtttgttttcacagcttagggattggtgggtgaggtctgtgtgcgttattttcatgttcccaaactgtgagctttatttcatgttatttttggtggatgttgacttagttcatgaatgttgtcacttctaaatgtggacagttgggctgcaggatgcaactcaacctcttttggatcctagagacccctgccaagcccccatcagtcctatttttaaatgaagacatcgccatttctagaagacctgagattttcttccctctgtgcttcgatgtattttaacctcaacattttgaaacggaaaatgcaaggaggggccaagaaatgtcctggggatttgatgccaggaagtacctggtaaggattggagattgctccagaatctactgcatgtcccaatttgcagtttgctcactagggctatatacaaaagctatacccttgagggtttttttttttttcttttgatttcctcaggaccttagagggaaaacaaacagtagcagctaatattctcaagtatattgctgcttagaaagatcctcaggaacaattagcagcaataagcaagcctttgaaaagatctgaattctttttcctgaaatatttacgatacacaggtgctttttatctgaaatctgttgtgtcctccttttaggcagtctctgtgggcagagagtgggacttgcgaggtggacagctgtggggatcctgggcaagggagtttcagaaggtgtggctcaggggctggtagaaacccccttttgttaggacttgttttttaaaaaagaaagccctaggccaggcgcagtggctgatgcctgtaatcccagcgctttgggaggccgaggagtatggatcacctgaggtcaggagttcaagaccagcctggccaacatggtgaaacccccgtctctactaaaaatacaaaaattagtcaggcatggtggtgggtgcctgtagtccagctactcaggaggctgaggcaggagaattgcttgaacctgggaggtggaggttgcggtgagccgagatcacgccactgcactccagcctaggcaacagagcaagacttcatcttaaaaaaaaaaaaaaaagcccagcattttgcagctttgaagctgctggggatcacgactgtctctgtggcccttacctggccacagatgtaccctggcaacccgctcacagtgccctgcgtgcaggtttatagataacccctgccagacctgctacaaccaagaccttatggtccaggtctcagtttggagaagatttagctgtctaccacttcttgtgtagtgttcctgtgaagttttatttttggttgcaagtatctggaaaacagatgcagatgtttttgtggatgttgttgagacttttgagacttctgtttctaaggtacacatgatgggacccaaactctcctggagagttccattcacttcctgaaacgtgcacctgtttcaggtgcatgtttattcagtgtgcatggatatttaagatttgctggagcaggctgggcagggtggctcacccctataatcccaaagtgctgggattacaggcgtgagccaccgcgctgggcctagatcaaatctttatccatgcacattggaacacaggattactgggttgaaatcattctagttttgtcatttagatacttgtagatgaatctattttagcacaaggtataaataactcgggaggtcatctctatcttctttccttttgtgcatttggctataccacgtttaggtactaaaacagctttgcttatgttggccaggggaaaacatggcattctgtgcgcaaagctaatgatcgccagccctgccttggcccctcccttgtttatggtcattgtaagatgcccgcatgttaaggcttaagctgtcactgggctgggtgtaatacccgcttcattcctcctcccaccctcttacccgaaacatgaagggcactgtgctctattgagatctcgataagatcatcattttaacttgtattcaactgagggaggtaacatgatatctgggtgctggtggattgagacctcaagcatcaattcaaaattgctgtcgaaaatatgcactattttttttttccactctggctaagtgtaggctctgaagccagttttatagcttgatacattctggtgaaagatgtcttcatttttaatgaaagaacctacagttagtaggtgtcacctcagggtagaaattctgatagaaattctgattatttgaaactctgatagaaatcctagatgctagatttgaagaaaacctgggttttattgcatagatttcaccttttctggggcacatcttaccccaaaataattggggatttttttgttccttctccattccatggaaccttgtagggtgttgggattgggcctcccctcgccacccgccacatgtctttgtttttttctctcttttgtatgtggaaaaatgtatttttgtaccatatctcatacctggagagaaaccttttttctatcttcagggctgtagaatatattagcgtaacacttcactgaatgtgacgtaaaagcattctgatgaaaactggttctgttataattaagactcagtgtttaaaatatcttaatcagtgttaatttcccagtgtttcagtatcacagtaaatacttgttttactgagaacagaaaataatccagaaaaggaaaaggaccagccctctctagattgctggaattgtatggatgtgttggggttggtttagtgatctcttccttgacaccctagcaaagatgcttttgtggagtgcaaacctttcataaatatactttccaggctgggtgcagtggctcaagcttgtaatcccagcactttgggaggccaaggcgggtggatcacttgcggtcgggagttcgagaccagcctggccaacatagtgaaatcccgtctctaccaaaaaatacaaaaaaaaaaaaa

SEQ ID NO: 7561 - DNA, 726 bp, Homo Sapiens
  XM_941938
atggccagctgtgctggaggcctggtcaaggtcagagcctgggtttgcagagaagcagacaaacagccaaacaaggagacttactctgtcttcatgactcattcccactaccttttttttctcctagtccaacctaaggtgactgtgtatccttcaaagacccagcccctgcagcaccacaacctcctggtctgctctgtgaatggtttctatccaggcagcattgaagtcaggtggttccggaacggccaggaagagaaggctggggtggtgtccacaggcctgatccagaatggagactggaccttccagaccctggtgatgctggaaacagttcctcggagtggagaggtttacacctgccaagtggagcatccaagcatgatgagccctctcacggtgcaatggagtgcacggtctgaatctgcacagagcaagatgctgagtggagtcgggggctttgtgctgggcctgctcttccttgggacagggctgttcatctacttcaggaatcagaaaggacactctggacttcagccaacaggactcttgagctgaagtgcagatgaccacattcaaggaagaaccttctgccccagctttgcaagatgaaaagctttcccacttggctcttattcttccacaagagctttgtcaggaccaggttgttactggttcagcaactctgcagaaaatgtcctcccttgtggcttccttagctcctgt

SEQ ID NO: 7562 - DNA, 1040 bp, Homo Sapiens
  XM_941963
atgggacagtccatacacaattgaatctagcattattaactttagattttttgaacctgcccaaaggccagatgtcatcagcagctgaacagcatctccagaaaccagctgcaaagacagaagcagaacaactggtttggtggagagatctgataacaaaaagttgggaaacaggtaaaataataacttggggtagaagttatgcttgtgtttctccaggccaaaatcaacagctgatctggataccatcaagacacctgaaatcttatcatgagccagatgctgaggaagagactccgggaggatcccgaggacgccccagttgcagccatgttgagactgacgctgaggaggaccccaactgtcacgagcaacacctgtcgaacacagccacccacctggggacagatcaagaagctgtcacagatggcagaagaaaacctgaggaaagcgggacaaccagtcacaatgagtaatttcatggtagctatgatagcagttatcaccactgcttctgcagatgtggatcctaactcctgcgagaagtaactcacagtgacaaagctgcctttgcttttatcgagttgcaaatcaaagaaggggggacatgttgggaacaggccccccaagatctggccataaactggccccaaaactggctataaacaaaatctgcagcactgtgacacgttcatgatggccgtgacgcccacgctggaaggttgtgggtttaccggaatgagggcaagggacacctggcccacccagggcggaaaaccgcttaaaggcgttcttaaaccacaaacaatagcctgagtgatctgtgccttaaagacacactcctgctgcagataactaaccagacccaccactttacttcggcccatcccttcatttcccataagggatacttttagttaatctattatctatagaaacaatgctaatgactgacttactattaataaatatgtgggtaaacctctgttggggctctcagctctgaaggctgtcagacccctgatttcccacttcgcacc

SEQ ID NO: 7563 - DNA, 349 bp, Homo Sapiens
  XM_942032
atgaggcttgagagaaacaacaggaagacccttcagcaaaaggccaaatggcactggatcccctctggggtggggctttgtgagggcagctgtcggcatcagctccctgccaatacctgcagccctgctgacagtctcgctccaagttacttccagagtcttcaagagtgccaactgggaccaggaccccagaccacagccccccacaccgtcctggacctggattctgactgtgggtctgttcctggtttcccagatgcataaaggaagacatatccctcccctgggcagcaaggctacaatgggagggagggagaacatgggagcatgtgaataaaatggcattaaa

SEQ ID NO: 7564 - DNA, 483 bp, Homo Sapiens
  XM_942117
atgccgtataggctcgtggaactgggtgatctggaccctctggcatctctcaaatcgctgacttacctaagtatcctaagaaatctggtaaccaataagaagcattacagattgtatgtgatttataaagttccgcaagtcagagtactggatttccagaaagtgaaactaaaagagcgtcaggaagcagagaaaatgttcaagggcaaacggggtgcacagcttgcaaaggatattgccaggagaagcaaaacttttaatccaggtgctggtttgccaactgacaaaaagaaaggtgggccatctccaggggatgtagaagcaatcaagaatgctatagcaaatgcttcaactctggctgaagtggagcggctgaaggggttgctgcagtctggtcagatccctggcagagaacgcaaatcggggcccactggtgatggtgaagaagagatggaagaagacacagtcacaaacgggtcctga

SEQ ID NO: 7565 - DNA, 108 bp, Homo Sapiens
  XM_942150
atgagggcatcttatcagtactctttgagcacatcaaattcttccattgccgctcttctctgtgccctttatccgcacttcccagctcacagcactgacaaccggtga

SEQ ID NO: 7566 - DNA, 267 bp, Homo Sapiens
  XM_942165
atggggtactttagggctgtgctgaagtttgctgctgccactggagccactccaattgctggccgcttcactcctggaaccttcactaaccagatccaggcagccttccgggagccacggcttcttgtggttactgaccccagggctgaccaccagcctctcacggaggcatcttatgttaacctacctaccattgcgctgtgtaacacagattctcctctgcgctatgtggacattgccatcccatgcaacaacaagatgatgtaa

SEQ ID NO: 7567 - DNA, 570 bp, Homo Sapiens
  XM_942174
atgtctcatatccgaaatcagatgcatggctttagtcttatcttccttataatgggccagaaaccaccactttctccaagtaggtcaaatgcccaccttgttttttctcttatcgtgctgcatgttgacctgcaggatgagctaggagtcttctccctgaaagggaggcccaccaccgcgtatatctacatcacagaggaaaataaaccacatgtaaaagcaaagaaagctcacacagcctccttggttgtttctcctggagatacagctgaatttgatgtcgttttccactcccagaaggttgggaggatgagaggtatcatccacttgtcagtgatcaacaaccaatatgaggagacctccatccacatggtgggagagggctatgaggatgacatcaccttggacaacatccatggactggtggcccccaccagccaggaagacataagtatctctgagttcacagagatcatcgaggacaatgatatggaagacttggtggcaggtgggagaaacagcagtgaagtgttggcaagtgttggctactgggtcatttgttttaaatga

SEQ ID NO: 7568 - DNA, 930 bp, Homo Sapiens
  XM_942212
gcacccagaattctaactaggatcttcaagaacaactctccccaggtcagtgcatggagcagaaagagaagggaaagggatagaatgtcttcatgactttaatcctagtatttgaaaaaaaataatcaaaccttgcacctacaaatttctgtcttgatccagaaagtcattagcataaaaaagataatagtggccttctcacctaacgccaccaacatggtgttcaggcgcttcgtggaggttggccgggtggcctatgtctcctttggacctcatgccggaaaattggtcgcgattgtagatgttattgatcagaacagggctttggtcgatggaccttgcactcaagtgaggagacaggccatgcctttcaagtgcatgcagctcactgatttcatcctcaagtttccgcacagtgcccgccaaaagtatgtccaacaagcctggcagaaggcagacatcaatacaaaatgggcagccacacgatgggccaagaagattgaagccagagaaaggaaagccaagatgacagattttgatcgttttaaagttatgaaggcaaagaaaacgaggaacagaataatcaagaatgaagttaagaagcttcaaaaggcagctctcctgaaagcttctcccaaaaaagcacctggtactaagggtactgctgctgctgctgctgctgctgctaaagttccagcaaaaaagatgacggccgcgagtaaaaaggcttcagcccagaaggttcctgcccagaaagccacaggccagaaagcagcacctgctccaaaagctcagaagggtcaaaaagctccagcccagaaagcacctgctccaaaggcatctggcaagaaagcataagtggcaatcataaaaagtaataaaggttctttttgacctgttggcaaatgtaaaaaaaaaaaaaaaagataa

SEQ ID NO: 7569 - DNA, 2735 bp, Homo Sapiens
  XM_942289
ttattttagagaagaatgcttctgaagagctgccattctgacgtcaaaaaactactaaaacgttgaaccattgtgtctcacactcaggtgatgattgggactgctcttaacacaagcgagatgaagaaactgatcacccacatgggggagatggaccacccctggaactgtccccatggaaggccaaccatgagacacatcgccaacctgggtgtcatttctcagaactgaccgtagtcactgtatggaataattggttttatcgcagatttttatgttttgaaagacagagtcttcactaaccttttttgttttaaaatgaacctgctacttaaaaaaaatacacatcacacccatttaaaagtgatcttgagaaccttttcaaaccagatggagcattgcttgcaaattttttttctctatgtttgcatgcgctcgtgtgtgtgtgtccaggcaagaacacattttataaaaataagaacacttgggctgggcatggtggctcatgcctgtgatcgcagcactttgggaggccgaggccggcggatcacctgagatcagaagttcgagaccagcctgaccaacatggagaaaccctgcctctactaaaaatacaaaattagccaggtgtgctggcgcatgcctgtaatccccgctacccaggaggctgaggcaggagaatcgcttgaacccgggagacggaggttgcagtgaaccgagattgcgccactgcgctccagcctgggtgagatagagcaagactgtgtctcaaaaaacaaaacaaaacaaaacaaaaaaaaaaaaaccaaaccactttggaagttactcaggcctctgctctggctggacatagtttagtctataactttcaacccttaacaataattaaattcatctttgtttaatttcataaatttaaaagtagggtccttttcagttagtgattctcagccctgattcacattaaatttttaaacacgggggattctctgcccggctggaagaaaatgactggatgggacaggggtcactatttgaaacattcctctgtgcggccaaggtcgcaaaatgctgtcctcgcaggggaacaaaaagagtttgatttcccataatttgatgctgtgatttggtttcctcaggatgtgaactgtagaacattccagttactggccttgaatggttctgggaatataagaatccctgtctgtcttttcaaatagttttcatggaaccttgtcctgtttgaacttggctgaaaatggaagtaaagatgccctcttgggggcccagagatgacagatgtggctccccctgctgcccccaccccttctccagactgtgggcggctccccttcctgctttagaatccttcagatggaggaggcagtacagtagtcactgtgccatcgtgtctggcactgtgctggcgtggtctgcaggatcccacttatgaactctccagattgggagctgtggcaggataacagcccccaagacagctgtgtcctaatccccagaacctgtgaccacgctgcctcacgtggcagaagggactcggcaggtgtgattgagtgaaggatcttttttttttttttctttgagatgaagtttcgctcttgttgcccaggctggagttcaatagcatgatctcagctcactgcagcctctgcctcccaggttcaagtgattctcccacctcagcctcccgagtagctgggattacaggtgtccagaaccatactggctaatttttgtatttttagtagagacagggtttcaccatgttgaccaggctggtctcgaactcctgacctcaggtgatccgaccgcctcggcctcccaaagtgctgggattacaggtgtgagccatcatgcctggctgagttaaggatcttgcaacagagagattatcctggattgtctgggtgggcccagtccattgggtgagtccttcaaaggtggagacctttccctgctggccagagagaggctgccttgctggttttggagatggaaggaggtaccactagtcaaggattgcaagcagtctctagaacagggattccaacactccggacacagaccagtagtggtccatggcctattaggaagtggggtgcacagcaggttaggggccggcaagccagcgaagcttcatctgtatttatagccactccccgtcgctggcgttaccacccgagctccgcctcctgtcacatcagcggtgggcattagattctcatagcagcacgagccctattgtgaactgcacacacgagggatgtaggttgcacgctccttatgagaatctgatgcctgatgatctgtcactgtctcccgtcacccccagatggggctgtctagttgcaggaaaacaagctcagggctcccactgagtctctgtgatggtgagttgtagaattatttaattatatgttacaatgtaataatagtagaaataaagtgcacaataaatgcaatgcacttgaatcgtcctgaaaccatccctccccgaccccaatccatggaaaaattgtgttccgcgaaaccggtctctggtgccaaaaaggttggggaccgcttctggaaaagctggaaaaggcaagaaaacgcattctctccctcagcctctggaaggaaccagcactgtgggactaatttacatactgtagggtaataaatttgtgttgcttcgaaccactaaatttatggtaatttgtttgcagcagcaatgg

SEQ ID NO: 7570 - DNA, 1761 bp, Homo Sapiens
  XM_942296
tgcttctcagactttaaaatgtgcctgcaaatctcctggcatccttgttaaaatgcaggtttgatctggtgggtctttggggtggggcccaagactacatttgtgatgagctcccgatgctgtgggttttgctggttcaggagcacactttgaatttcaaggctcaggcctgtaggcattctcccctctgtggcttggtgccctcgccagaccatggctgatgtcagagctggtttcctagtgattgcccctcagggtcttcctgcttttctaccctaccctgccggtgagggacacctactcatgcaccacttgaagttgagttccagaaagaagacgccagggatgaggctggacagagggtctcacggatggccccgctgccaggagcagaactggttcggaggccactgcagctctaccgatacttgctgcgctgttgccagcagctgccgaccaagggcatccagcagcattacaagcatgctgtcaggcagagttttcgggttcattcagatgaagacaaccctgagagaatccagcagattattaaaagagccattgaagatgctgactggatcatgaacaaatataaaaaacaaaactgagagctccgagggtgagccttcctggcctctggaagttgagaggcccctcttctggagctcagcagcagcagctggtttggaagagccattggccttgttggctgaaagccagaaatcaggggagaagctgaccttgctccagaggctcctcttgccgcggccatgttgctagcatcctttatgtttgcacttccagccacttacgatgtgaaatttggggagaatgtagtatttttttgcttcttttgtgtgttttttatttttgtgtttttgttcttttacttttctctgaaagtgattcatttattctggagatctctttatcattctctgagtcccagagcagatgtcccctcaggtagcaacctgtacagaagaaagcacgtgggttttagaaccagacagatctggatttgaatcccagatgcaataagatgaaggtgaagtgcctcacacaggatgtggcacatgacagtgcctgaagggctcccttcaaggaagccgtcctgccccgccccctcctctgctcctgcagcgccctgcacagctctgctccccgcatgcaccgcatcgggtctcagttttttgtttgcgagcttgccctgtccctgcttgtagcccctgagccctcacagttgtcacacacccagcagtctgccaaggagctgcttttcctgactactgtctctccatgcctagggaagtcaaagccctgggccttgccttcagggagttgacagtgtccttgaagtggtgaagtgcccaccacatgaaccaaggagagacgccaaagcagctgccatggactctggcctgtccaagcctctgtgcacctgcagtctctttccactggcacttccctgctttgctaccatcgtggaagaatggaagggagggggagaaggtgggtgggctcagggagaacggccagagtggccagaagatgcagagagaagccccactgggatctgagtattccccaagggcactcagccacagggatgaactagtgtttgtttgtatccttgcagttatgtgacttaaagtgactcagagatatctatgtatgcgagtgtactccgctggcaatgaagtaaatatatcaatttgtggaagctcgtgtgtcttctcaactgataaaccatacgttccc

SEQ ID NO: 7571 - DNA, 300 bp, Homo Sapiens
  XM_942351
atgtggactgccctacatttggcctgtgccactggccaaccggaaatggtacatctcctggtgtccagaagatgtgagcttaacctctgcgaccgtgaagacaggacacctctgatcaaggctgtacaactgaggcaggaggcttgtgcaactcttctgctgcaaaatggcgccaatccaaatattacggatttctttggaaggactgctctgcactacgctgtgtataatgaagatacatccatgatagaaaaacttctttcacatggtacaaatattgaagaatgcagcaaggtatag

SEQ ID NO: 7572 - DNA, 1598 bp, Homo Sapiens
  XM_942362
ggtgagtggcgagctgtggagtgctgccaggaggctgggattccaggccagggacggggacagccctgctggtggagtccgaatgccaggcagaggggacgcacacctgcccatgctcctgccttgcaagagggcgtctgcctgggatcagagcctagagcgtgtgggaggagagttgtggggtcccggcatgggcagggtggcaggtgggtcccgcgtgcttgggactgggcacgaggaggccttgtaactggtgctggatcagctgggtcaggggccgcacaccaatgacctgggggtgagggtgcccctgggtgggagctggtggtgctgaggtggccgaggacttgtccactcccaagggaaggtgctggtgggagggggtgccacctccgcagccaccaccctcgatgctgacctgggttgcactggcatctcactgggcgtggggactccgagagtccaaaattgggtggagacatttggggacacagctgcctgaattcctcatggccaagggggtgggcaagggctgcagggaggaagagtgtccgctgtcctggccagtgcaccaggaacggctttctaacccgggcaggaaggtatgaagcattcaggatgtgggggccacacagttcccagtgtgcacctaggggtgaccaggaggaggagaggcgccagggcctcccttacccccgccccaggggcactccgtaggcaggatccctgcagatcctagctaggaaacgccagtgaacggcagcgcagggaacggggcggggccgctggcttcgcccaccgccacggtgttgggggctgggggtggccctcgggactggtgtggagcctgagcctgacccactgacttggctgagtggggagactggagggtcgcatccggagctgggcccggggacgcccgctggtgggaagggtgcgcgcgcgttggaggccgcggctgaccctgctccggcgccgccaggtacggcatcagcccggacagcatcatcctgtacgggcagagcatcggcacggtgcccaccatggacctggcctcgcgctacgagtgtgccgcggtggtgctgcactcgccgctcacctcgggcatgcgcgtcgccttccgcgacaccaagaagacctactgcttcgacgccttccctaacatcgagaaggtgtccaagatcacgtctcccgtgctcatcatccacggcagggaggacgaggtgatcgacttctcgcacgggctggcgctctacgagcgctgccccaaggcggtggagccgctgtgggtggagggcgccgggcacaacgacatcgagctctacagccagtacctggagcgcctgcgtcgcttcatctcccaggagctgcccagccagcgcgcctagcggcggccccaaccagccggacctcagcaataaggcggcccccggacctcaccccgcgccggcccccacccaggggctgcatgtggacccccccgggcggcccaggggaccccgccccgacccaggggctgtggacgatgtacaggcaacagagctacgcactcctttccttttggaagcaagaagaaaatacgtgaaaacggaaattaa

SEQ ID NO: 7573 - DNA, 1492 bp, Homo Sapiens
  XM_942374
ggttccagggtgcacaccactccttgtagcaggtcccctgtcttgtgtgctgtgtccccccgaggtatgctggtgctggtggcccaggcaggaggtgacactctcaaagtgactggtcactacgtaaaatgtgtctttcttttgtttgtttcccacctgctttccgagcccctttctcggacagttgaccacggcatgtttgagaatttgaacacagccctcactccaaagctccaggccagccgctccttcccccacttgtccaagcccgtggcccccggctctgcccctctgggctctggtgagcctggggggccaggactctgggtgggcagcagccagcacctcaagaacctgggcaaagccatgggggccaaagtgaatgacttcctgaggagaaaggagccctccagcctgggcagtgtgggtgtgacagagatcaacaagactgcaggagcacagctggccagtgggactgacgcggctccagaggcttggctagaggatgaaaggtcagtcctgcaagaaacatttcctcggctggatcctccacctcccataaccagaaagcgaacccctcgggccctgaagaccacccaggacatgctgatttcatcacagcctgtcctcagcagtctggagtatgggacagagccatcacctgggcaggcccaggactccgctcccactgcccagcctgacgtcccagcagacgcttcacagccagaggccaccatggaaagagaagagagaggcaaagttctgcccaatggagaggtttccctgtcagtacctgacctaatccacaaggatagccaggacgaatccaagctaaagatgactgagtgcagaagggcctcctcccccagccttatcgagaggaatggcttcaaactcagcttgagccccatcagcctggctgagtcctgggaggatggcagcccccctcctcaggcacggacctccagcctcgacaatgagggccctcacccagacctgctgtcctttgaatagagcctctgctctttcctgctgagctctgcccttgtcttcctgctgctttctcctccactgcgcacactggccctggcctcaactccgctgtgccctttgtcttccttgtatgaggcaccagcagagagccagtcgtccatcatgggattttgcaggactggaagtccttgagtagttctagttaaagagtctatccgcagaatggctgaaggacttgatgccgttttgagcctaattttctgtaacctcctccgagtgggctgcagcccttggacattagagctcttccactcttgagcttgtcctgtcttctcagtgaattgcagggccaccagctcaggacaatggatcttacaggaattctttttgcctgtcccctacatgcgcctcctcccctgctgttctccctcccacacccctgtcccttctctctcctccttgatgggtccgatgcccctggcctcagcgggaggaaggc

SEQ ID NO: 7574 - DNA, 1191 bp, Homo Sapiens
  XM_942424
gtaaagatgaggtcttgctctcctgcccaggctgtctcaaaatcctgagttcaagtgatcctcctgcctcggcctcccaaaggtgtgggatgacaggtattagccaccatgcccagcccaaattttaattttttataatagatgtgaatgctttacggtagtaaatgataaaatggactagtatttacatattttatgcatccatcatgacataccttaattttttgatatttcaaaaaatgagaatcacctaagtttattcaaattgtcacaaatcctttcttctccgagaaaacaccaaatggtggatgacaccagtgcagcgggggggggcccggaggccctgggatggggaactgcggtggcttccgcggaggtttcggcagtggcatccggggccggggtcgcagccgtagacggggccggggccgaggccgcggagctcgcggaggcaaggccgaggataaggagtggatgcccgtcaccaagctgggctgcttggtgaaggacatgaagatcaagtccctggaggagatctatctcttctccctgcccattaaggaatcagagatcattgactttttcctgggggcctctctcaaggatgaggttttgaagattatgccagtgcagacgcagacccgtgctggccagcgcaccaggttcaaggcgtttgttgctatcggggactacaatggccacgtcggtctgggtgttaagtgctccaaggaggtggccaccgccatccatggggccatcatcctggccaagctctccattgtccccgtgcgcagaggctactgggggaacaagattggcaagccccacaccgtcccttgcaaggtgacaggccgctgcggctctgcactggtgcacctcatccctgtacccaggggcactggcattgtctccgcacctgtgcccaagaagctgctcatgatggctggtatcgatgactgctgcacctcagcctggggctgcactgccaccctgggcaacttcgccaaggccacctttgatgccatttctaagacctacagctacctgacccccgacctctggaaggagactgtatttaccaagtctcccgatcaggaattcactgaccacctcatcaaggcccacgccagagtctccgtgcagcggacccaggctccagctgtggctacaacataggcctgtgaacagtta

SEQ ID NO: 7575 - DNA, 222 bp, Homo Sapiens
  XM_942439
atgtacgtactttcctgttcattgtgccacccctttgctgtgaagttgcttgcgctctgtaagaaagaaatcaagaattcaaaagatatccagaagctcctgtcaggcatcgcagtgttctgcgggatggtgcagttccccggcgacgtgaggaggcaggccctcctgcagctgtgtctgctcctctgccaccgtttcccgctgctgagcccctctcgttaa

SEQ ID NO: 7576 - DNA, 709 bp, Homo Sapiens
  XM_942442
ccaccatgcccagcctcatcattcttattaactggtttaatcctttcaataatcctattaagtagaattattaggtaattagaattaggttaaaaagagctgaggtgtgggtgttcgtttctcaggtaaaacatggctaaaagcttacggagtaagtggaaaagaaagatgcgtgctgaaaagagaaaaaagaatgccccaaaggaggccagcaggcttaaaagtattctcaaactagacggtgatgttttaatgaaagatgttcaagagatagcaactgtggtggtacccaaacattgccaagagaaaatgcaatgtgaggtaaaagatgaaaaagatgacatgaaaatggagactgatactaagagaaacaaaaagactcttctagaccagcatggacagtacccaatatggatgaaccaaaggcaaagaaaaaggctgacggcaaagcgagagaaaagaaaggggaaaagcaaagcaaaagcagtgaaagtggcaaagggtttggcgtggtagactcttaaaaccttggaaaatgccacatgggatagatgatggattagaatgtatatacatgtatactttgatttcagctgccaccaaatgaaaaccatttgttttcctattttaacttggccttttttcttcaattcaaacccagcataactcctgaagtttgttttgggaacttgaataaaatattttcttt

SEQ ID NO: 7577 - DNA, 81 bp, Homo Sapiens
  XM_942532
atgaggcggttcctgaggccagggcatgaccctgtgcgggagaggctcaagcgggacctgttccagtttaacaaggggtga

SEQ ID NO: 7578 - DNA, 1125 bp, Homo Sapiens
  XM_942536
ggagaatgaggactgcgaaggagaacgcagcaagcccaggcggcggtggaaaggctggaggacacacctaaacatgtggaatcccaatgccgggcagccagggccaaatccatatccccccaatattgggtgccctggaggttccaatcctgcccacccaccacctattaatccaccctttcccccaggcccctgtcctcctcccccaggagctccccatggcaatccagctttccccccaggtgggccccctcatcctgtgccacagccagggtatccaggatgccaaccgttgggtccctaccctcctccatacccaccgcctgcccctggaatccctcctgtgaatcccttggctcctggcatggttggaccagcagtgatagtggacaagaagatgcagaagaaaatgaagaaagctcataaaaagatgcacaagcaccaaaagcaccacaagtaccacaagcatgacaagcattcctcctcttcctcctcctcttccagcagtgattctgactgaatacaggccctggacccttccctcaagtcccaccagttctgctctcccatcaagcttcagatgccacgttgtactgggggaatgtagcccttgtgctccccaccccctacctccacctgagcctcaccctgctgttgagccctgagtggctaggggaaataggaagaggattgccatggcctggccatcttgttgctgcttggagagatcatatagctaatgaattaggcaggggagctattttttgaagatgatgaactaaatgttgaagacaagtttgagatctgtaaaatgtgattttttacttccacttataatacttgtgattggggaggtttgtggaaattcaattatgatgaaaaacctctatcttttttgtaatgttggcatacttgggggatttagtggcaaatacattccccagcaggccttttgttggttgcactaactgcaaggttgctgggaagtagagtccatttggttgatgagctttgactgcggttttggaaccttacctctcctccttagcccaatatgctgtctcgggtcctattcaaataaagttatttctcctggtctaaaaaaaaaaaaaaaaaaaaaaagaa

SEQ ID NO: 7579 - DNA, 514 bp, Homo Sapiens
  XM_942552
cctgatcggaggagtgcgggccggagggtgatgggaccatctagcccctaaccatgggcccagaagagaagaccatcatgacagaaaggtctgcagctgttttcatccaggcctggtggcggggcatgctggtgcgacgcacactgctgcatgcagccctcagggcttggatcattcagtgctggtggaggcaggtgctggagaagctgctggcaaagaggcggaggatggtgttggagttctatgtgcagcaggaatgggcagcagtcaggctgcagtcctgggtccgcatgtggtgtgtccgccagcgttactgtcgtttgctcaacgctgtccgcatcatccaggtctattggcgctggcacagctgccattcccgtgtctttattgagggccactatgaactcaaagaaaaccaacttaatattcaacttgaaatctctttgggcttacaggcttgtaaggtgcaacaatgcataccccttccattaaaagaatgaccaggtctgctata

SEQ ID NO: 7580 - DNA, 840 bp, Homo Sapiens
  XM_942610
acatggagggaaggagctacgagtagccgccgagaggccgcggagccagcgacgacggagccagcgaccaccgacccagctgagccgccgcccccgccgcgcccccatggcggccaccaaggacactcatgaggaccatgatacttccactgagaatacagacgagttgaaccatgaccctcagtttgagccaatagtttctcttcctgagcaagaaattaaaacgctggaagaagatgaagaggaactttttaaaatgcgggcaaaatggttgcgatttgcctccgagaacgatctcccagaatggaaggagcgaggcactggtgacgtcaagctcctgaagcacaaggagaaaggggccatccgcctcctcatgcagagggacaaaaccctgaagatctgtgccaaccactacaccacgccgatgatggagctgaagcccaacgcaggtagcgaccgtgcctgggtctggaacacccacgctgacttcgccgacgagtgccccaagccagagctgctggccatccgcttcctgaatgctgagaatgcacagaaattcaaaacaaagtttgaagaatgcaggaaagagatcgaagagagagaaaagaaagcaggatcaggcaaaaacgatcatgccgaaaaagtggcggaaaagctagaagctctctcggtgaaggaagacaccaaggaggatgctgaggagaagcaataaatcgtcttattttattttcttttcctctctttcctttcctttttttaaaaaaattttaccctgcccctctttttcggtttttattctttcatttttacaagggacgttatataaataactgaattcaa

SEQ ID NO: 7581 - DNA, 498 bp, Homo Sapiens
  XM_942615
atgttgttagaagcaagcaccacagtgcgtgtaaccaactccaatgccaatgcggccagtcccctcatagttgctggctacaatgtgtctggctctgtccgaagtgatggggagcccatgaaaggcgtgaagtttcttctcttttcttctttagtaactaaagaggatgtcctgggctgcaatgtctcaccagtgcctgggttccagccccaagacgagagtctggtgtatttgtgctacacggtctccagagaagatggctcgttctctttctattccttgccaagtgggggctacactgtgattccgttctatcgaggggagaggattacctttgatgtggcgccttccagacttgacttcacagtggagcatgacagcttgaaaatcgaggtgacatttgagcaacaacctgaagggaaagaacaagagaaccatacttcactcctgcaggaagagtgtgtaagactgagggaacggcacgtgcaaaggtcctga

SEQ ID NO: 7582 - DNA, 3470 bp, Homo Sapiens
  XM_942702
gagagaaagaagaaagaaaaggagccagggatggctcttcctcagggatctttgacattcagggatgtggctgtagaattctctcaggaggagtggaaatgcctggaccctgttcagaaagctttgtacagggacgtgatgttggagaactacaggaacctcggcttcctgggactctgtcttcctgacctgaatattatctccatgttggagcaagggaaagagccctggactgtggtgagccaagtgaaaatagcgaggaacccaaactgtggggaatgcatgaaaggcgtgatcaccggtatctctcctaaatgtgtgatcaaggaattaccaccaatacagaacagtaacacaggagaaaaattccaagcagtgatgttggaaggacatgaaagctatgacactgaaaatttttacttcagggaaatccggaaaaatctacaggaagttgactttcaatggaaagatggtgaaataaattataaagaagggccgatgacccataaaaacaatcttactggtcaaagagttcgacatagtcaaggggacgtagaaaacaagcatatggaaaatcagcttatattaaggtttcagtccggtctgggtgaattgcagaaatttcaaactgcagagaaaatttatggatgtaatcaaattgagaggacagttaataattgttttttagcttcaccacttcaaagaatttttcctggtgtccaaaccaacatttctaggaaatatgggaatgattttttgcaactttcgttacctacacaagacgagaaaacacatattagggaaaaaccttacataggtaatgagtgtggcaaagccttcagagtgtcttcaagtcttattaatcatcagatgatacatactacagagaaaccttacagatgcaatgagtctggtaaagcctttcatcggggctcactactaacagtacatcagatagtccatacaagagggaaaccataccaatgtgatgtatgtggcaggatcttcagacaaaattcagatcttgtaaatcaccggagaagtcacactggagacaaaccctacatatgtaatgaatgtggcaagtcctttagtaaaagttcccaccttgcagttcatcagagaattcatactggagagaaaccttacaaatgtaatcgatgtgggaagtgctttagtcaaagttcctctcttgcaactcatcagacagttcatactggagacaaaccctacaaatgtaatgaatgtggcaaaacctttaaacggaactcaagcctcactgcacatcatataatccatgcaggaaagaaaccatatacatgtgatgtatgtggcaaggtcttttatcagaattcacaacttgtaaggcaccagataattcatactggagagacaccttacaaatgtaatgaatgtggcaaggtcttctttcaacgttcacgtcttgcagggcaccggagaattcatactggagagaaaccctacaaatgtaatgaatgtggcaaggtcttcagtcaacattcacatcttgcagtgcatcagagagttcatactggagagaaaccttacaaatgtaatgaatgtggcaaagcctttaattggggctcattactaactgtacatcagagaattcataccggagagaaaccttacaaatgtaatgtgtgtggcaaggtctttaattacggtggatacctttcggttcatatgagatgtcatactggagagaaacctctccattgtaataaatgtggcatggtcttcacttactattcatgcctagcacgtcatcaaagaatgcataccggagagaaaccttacaaatgtaatgtgtgtggcaaggtcttcattgacagtggaaacctttcaattcataggcgaagtcataccggagagaaacctttccagtgtaacgaatgcggcaaggtcttcagttactactcatgcctagcacgtcatcggaaaattcataccggagagaaaccttataaatgtaatgattgtggcaaagcctatactcagcgttcaagcctcactaaacatctggtaattcatactggagagaacccttaccactgtaatgaatttggtgaggcttttatccaaagttcaaaacttgcaagatatcacagaaatcctactggggagaaaccacacaaatgtagtgaatgtggtagaacttttagtcataaaacaagtctggtgtaccatcagagaagacatactggagagatgccatacaaatgtattgaatgtgggaaagtctttaactccactacaaccctggcaaggcatcggagaattcatactggagagaaaccttacaaatgtaatgaatgtggcaaggtcttccgttatcgctcaggcctcgcacgtcattggagtattcatactggagagaaaccttacaaatgtaatgagtgtggcaaagcctttagagtacgttcaattctgcttaatcatcagatgatgcatactggagagaaaccttataaatgtaatgaatgtggtaaagcttttatcgaaaggtcaaacttggtttaccatcagagaaaccatactggagagaagccatacaaatgtatggaatgtggcaaggcgtttgggcggcggtcttgcctcactaaacaccaacgaattcattctagtgaaaaaccttataaatgtaatgagtgtggcaaatcttacattagtcgctcaggcctcactaaacatcagataaaacatgctggagagaaccttacaactaaactcaatgtggaaaggccgttagatgttgtcctaacctctgggatccccaaataatttatacttactcatatagcttgtatatttgtcctttccctttgaagtctcatgtggaattgtagtaatctccagtattggaggtggagcctagtgggaggtgattggatgatgggggtggctttctcaagaaagttttagtaccatccccttgttgctgtccttgtgatagttctcatgaggtctggctcatgcctgtaatcccagcactttgggaggctgaggtgggcggatcacttgaggtcaggagttcaagagcagcctggccaacatggtgaaaccctgtttctgccaaaaatacaaaaattagctgggcttcgtggcgggtactggtagtaccagctactcgagaggctgagtcaggagaattgcttgaaccctggaggcggaggttgcagtgagccgagatcgcgccactgcactctagcctgggtgacagagtgagactccatcacgcacacgcacgcacgaaagtgaatggcacctccctcttgtttgttcttctggccatgtgacatgcccttcacctcccaccatcattttaaccttcctcaggtttcccgagagggtgaacagacgtcagcgccatgtttcctataaagcctgcaaaattgtgagtcaattaaacctctttatacattacctagcctcaggtatttctgtct

SEQ ID NO: 7583 - DNA, 1695 bp, Homo Sapiens
  XM_942723
agaccctctcctaagagcccccaccaaaatcctctctaggggcaggggatagagcaagacatgtcccccacccagagcaggggctgcggtcagggagctcaggggactcagccactccatggcagagccctgtttaatacaacttgtgtctgggatggcctggatcagagaccctatctaaggagcatgttcagaaaccatgttgctgggatcagacagcagggtccaactgcaggcctgtggtgcaggagctgtgtgaccatggggctgtcaccaggcctctctgtgctgggttcctccagtatagaggagaggcagtatagaggagagggccgcgtcctcacagtgcattctgtgttccagcatccccgaccagccccaaggtcttcccgctgagcctctgcagcacccagccagatgggaacgtggtcatcgcctgcctggtccagggcttcttcccccaggagccactcagtgtgacctggagcgaaagcggacagggcgtgaccgccagaaacttcccacccagccaggatgcctccggggacctgtacaccacgagcagccagctgaccctgccggccacacagtgcctagccggcaagtccgtgacatgccacgtgaagcactacacgaatcccagccaggatgtgactgtgccctgcccaggtcagagggcaggctggggagtggggcggggccaccccgtcgtgccctgacactgcgcctgcacccgtgttccccacagggagccgccccttcactcacaccagagtggaccgcgggccgagccccaggaggtggtggtggacaggccaggaggggcgaggcgggggcatggggaagtatgtgctgaccagctcaggccatctctccactccagttccctcaactccacctaccccatctccctcaactccacctaccccatctccctcatgctgccacccccgactgtcactgcaccgaccggccctcgaggacctgctcttaggttcagaagcgaacctcacgtgcacactgaccggcctgagagatgcctcaggtgtcaccttcacctggacgccctcaagtgggaagagcgctgttcaaggaccacctgagcgtgacctctgtggctgctacagcgtgtccagtgtcctgccgggctgtgccgagccatggaaccatgggaagaccttcacttgcactgctgcctaccccgagtccaagaccccgctaaccgccaccctctcaaaatccggaaacacattccggcccgaggtccacctgctgccgccgccgtcggaggagctggccctgaacgagctggtgacgctgacgtgcctggcacgtggcttcagccccaaggatgtgctggttcgctggctgcaggggtcacaggagctgccccgcgagaagtacctgacttgggcatcccggcaggagcccagccagggcaccaccaccttcgctgtgaccagcatactgcgcgtggcagccgaggactggaagaagggggacaccttctcctgcatggtgggccacgaggccctgccgctggccttcacacagaagaccatcgaccgcttggcgggtaaacccacccatgtcaatgtgtctgttgtcatggcggaggtggacggcacctgctactgagccgcccgcctgtccccacccctgaataaactccatgctcccccaagcagccccacg

SEQ ID NO: 7584 - DNA, 1605 bp, Homo Sapiens
  XM_942728
ggaaggcttgggagtcctcttagacagatcctcagtcacttccctctgcttgtgtctcaggaagaccacctcctcctactgtcttctgtgctagggatcacttccttgttgagtggaacctgagttttaagaggatcttctgctcctcttcatctggtccctttccttccaaggccccagagaggaaggcatgcagtgggccctagcggtgcttctagctttcctgtctcctgccagtcagaaatcttccaacttggaagggagaacgaagtcagtcatcaggcagactgggtcatctgctgaaatcacttgtgatcttgctgaaggaagtaacggctacatccactggtacctacaccaggaggggaaggccccacagcgtcttcagtactatgactcctacaactccaaggttgtgttggaatcaggagtcagtccagggaagtattatacttacgcaagcacaaggaacaacttgagattgatactgcgaaatctaattgaaaatgactttggggtctattactgtgccacctgggacgggcacagattataagaaactctttggcagtggaacaacacttgttgtcacagataaacaacttgatgcagatgtttcccccaagcccactatttttcttccttcgattgctgaaacaaaactccagaaggctggaacatacctttgtcttcttgagaaatttttcccagatattattaagatacattggcaagaaaagaagagcaacacgattctgggatcccaggaggggaacaccatgaagactaacgacacatacatgaaatttagctggttaacggtgccagaagagtcactggacaaagaacacagatgtatcgtcagacatgagaataataaaaacggaattgatcaagaaattatctttcctccaataaagacagatgtcaccacagtggatcccaaatacaattattcaaaggatgcaaatgatgtcatcacaatggatcccaaagacaattggtcaaaagatgcaaatgatacactactgctgcagctcacaaacacctctgcatattacatgtacctcctcctgctcctcaagagtgtggtctattttgccatcatcacctgctgtctgcttagaagaacggctttctgctgcaatggagagaaatcataacagacggtggcacaaggaggccatcttttcctcatcggttattgtccctagaagcgtcttctgaggatctagttgggctttctttctgggtttgggccatttcagttctcatgtgtgtactattctatcattattgtataatggttttcaaaccagtgggcacacagagaacctcactctgtaataacaatgaggaatagccatggcgatctccagcaccaatctctccatgttttccacagctcctccagccaacccaaatagcgcctgctatagtgtagacagcctgcggcttctagccttgtccctctcttagtgttctttaatcagataactgcctggaagcctttcattttacacgccctgaagcagtcttctttgctagttgaattatgtggtgtgtttttccgtaataagcaaaataaatttaaaaaaatgaaaa

SEQ ID NO: 7585 - DNA, 2607 bp, Homo Sapiens
  XM_942885
gaaggggagagtcggcggtcggagcggggtgacgaggacctcatgcacgaggcggcgaaggaccgatggcagagaaccgagtgcggcgcgaggcggtggccgcggccagcgggtgggtgcgtctgggcgcaggcgggcaccggggcccagggtctggtcctcctccttgtggcgggtccagggcgcggccgcctcgcccagcccctaggcgcactcgtcccggcgcggaggcggcggcgacaaggcagtcgctgggtgccgcgtctgccggcggagacgcagaccgacgcgcaagaggcgaccgcggctgcctcggctcccagctctgttaactgcgcggagtactttcgactttggagataggagggcgatcgcctcccccacccaccgcctccgcccaccacccaccgcctccgcccctccgagcaacttttcccggtgcctgcgagctccccctccgcgccgagccgaacgtcccggcccgccgcgcttcgtgccgccgcgcgcgcagggaaggccgcttctccttcaaagctggcacggccgcgagtccggaacaatagtcggggtgtcccgaatgccaggagcacggccactgcccgccgggctgtgggtggcacaggaatgggggttgcgtggtggatgcagagcggggtgcatccctggatggcatcgctggagcgctcgccgctccggcgacatcgcgagcggtgcaaaccgggccgcctggagcccgtgacgcggtggcggcgagggcggtggggctgcctgtcctcgggctacaggactggggctcctggggaccccaagctgctcgagcccagggctgctggcgccaacagagctgtgccctgaggacccggcctccccgcccggggggaggccgcacaggagcgtccccagcaggtcccgcgaaggcgtaacagagccacaaacttttgccgactcccgcggccgcggccgccggcagcccgactccggccgcggtgctcatttaaggtggcgcgggcactagccgagcaggctggcctctggccgcgcttttgtccctgcgattccgcttgggcgcgctgcctccttaaggaaaagcacgtgggcaggggccgcagcccccgcgagatacccggggcgtcggcggacattagccgctaggaccttaggcgagaaaatgtggacgcatccccgccggccctgaggccaaagaagtccgaggcgacctgggagtcggtcggatcccagccgagaaaagaaacaagcaggatagcaattcttaggggagccaccctgggagttttaggcagcgtttgcctttccctggttttcttcaccaagccccatcctccccccgcataccacccccagtcaaaagagtgggagaaaatgcacagttcgaagtcggtgagagcaaaaatgggtctagtaaatcaacccgtggtggtagctaaaaggtttggggctgcaaagaaacaaactgtaagttttgagcaacaaactttttcttcaatctgtaatatgtcgaaatgggaagggggtgttgcaaaagccaactaccactgtcaaacttagcccgtttacaacatggggaaaggcgtatttcttactaatatctcaacaacgataacaatgctgtatccttccttaccttgatgttgaactgcgaatcctcctccggatcaatgtccaggaacttagaagaattggtgatattaggagttcagtacttctggaaaaaaatgcaaatggtttagccaggatctttcctgtctgattcgtcactattattatatctgatgatgcgaatggttggagcgattcaatcctaagtcattaatgagctattttataaacaccactgtctgaagatcttcatttacattttgctaaggatcacttcgctaacctcacaggcttgtgtcaacagcatgatttgcaggacttcagttacactcttataaacaacacggctgtattgttaatcggttaatattttataaagtgtaaatattttattatgttttgaagggaactattgattctaaattattaaacccctgagaaggactatttaaatgaaatatacaattaagtacaattaaatgtacattgtggttagtttgttttcagattctgcacccttttaaattcattgcttttctctttactggagtttcctcttgtccatttctgatactgaaaaaaatctatcatgttaggaaaaagcctaaattatttaaagttgcattaaacttagaggaaaatgtcaaatacgattaattatgaccagaaatgtattttggatgtttgtagagttgtatttcatatcacattttacaaatttcttccgatttaaaggagagttctaggaagttttgtgatctatgtccggtgtgggtttttgtcctctcgagttttgtctctaataaaggccttttttgtttcaaattacatacgctttttactgcacaatttttgtattgaccttatttcaactgaagcgattatttccagcaggtttaatttcgacaataagatatattttaatagttttacctttcgctagaattttgtattgtttaaaacagtaaatgaataaatttgctgatgatt

SEQ ID NO: 7586 - DNA, 1857 bp, Homo Sapiens
  XM_942991
cagtagcttgccgatgctcccagctgaataaagccctgccttctacaactcagtgtctgagaggttttgtctgcggctcaccctgctacatttcttggttccctgactgggaaacgaggtgactgacggatggccgaggcagccccttaggcggcttaggcctgccctgtggagcatccgtgaggggaactccggccagcctgagtgacgtgatccaaagagcgctcccgggtaggcaattgccccaatggaacgcctcgccagagcagcgtgtagcaggcccccacggaagattaacacagtggctgaacaccaggaaggaactggcacttggagtccggacatctacaacttggcccaaccaccgagaccacccttaaacatcagtagactgggagctgtacgtggatgggagcagctttgccaacccttgcaaagtgactctgaagaagacgacaagccttgttccggtcacacccggaagctgactggttcacgcatggccgaagcatgaggaaactcatcgcgggaataattttccttaaaatttggacttgtacagtaaggacttcaactgaccttatgctaagctgcctgatcagtggacaggtagctgtgtaattggacaggtagctgtgtaattggcaccattaagccatctttcttcttactgccaataaaaacaggtgaacttctaggcttcctagtctatgcttcccgtgaaaaatgaagcatagccataggtgattagaaaataatgaatggccccctgaaagaatcatacaatactatagacccaccacttaggcacaagatggctcatgaggatatcgaacccccatctacatgctcaaccgaatcatacagttacaagcggttttagaaattattactaataaaaccggtcaagccttgactgttcttgcccggcaagagactctgatgagaaattttatctatcaaaatatactagctcttgactacttgctagcagctgaaggagaagtttgtaaaaaatttaaccttactaattgttgtctacacataaatgattaagggcaagtagttaaaaatatagttaaagatataacaaaactggcacatgtacccatgcaagtgtggcatgggctcaatccgggagccatgtttgcaaattggttcccagcaatgaaaaaatttaaaactcttataataagagtaataatagtaatagaaacctgcttactgctcctttgtctgatacctgtatttctccaaatgataaaaaactttgtcacgaccttagttcaccaaaatgctttagcagaagcatactatataaatcactatcaatctattgcacaaaaagacataagtagcaaaaataagactcagaactcccactaataaaaactgagagtctcaaaggggggaaatgagggaagagagagagaccctctcatattgttttatattgttttatactcagtacctcttttaagaaaaagtgacaaggaagtaaaaccaaagacaggcagcctggtgccaggcctgaaaccaggcctgggcctgtctggcctaaacccagtagttaaaaatcaactcataacttagaaactgatgttattcatagattccagacattgtatagaagaacattgtgaaactccctgccctgttctgtttctctctgaccactggtgcatgcagcccctgtcatgtaccgcctgcttgctcaaatcaatcacgaccctttcatgtgaaatctttagtgttgtgagcccttaaaagggacagaaattgagtatttggggagcttggattttaaggcagtagcttgctgatgctcccagctgaataaagcccttccttccacaa

SEQ ID NO: 7587 - DNA, 2090 bp, Homo Sapiens
  XM_943043
gattagtgccccccaccccccccgaagagcgacccctagtggtgcaccggtgcggaccagaaaattgcacgctttcttgaaacaggtattgactgagcgcccaatgtatgcctggcactgggctgggtgctgccacctaagcgagcacgaccaatgcaagtctatcagggacgccctgaccgccaagcagctggcccctgcagtccgccatgccactcccgacgcctagcgcgccgctcagcacaccgtgagcgcccactaactgttgggctccaatgacgccgaggaggcggccccgtccccgcgctcccgccgctcccgccagggcagcccgggaggccagacgctggcgctgcagggagagggcggtgggcgcatccgctagggggcgcggcggggcggggcgcacctttcggcgggcctcgcggatggcggcgcagggcgtagggcctgggccggggtcggcggcgcccccggggctggaggcggcccggcagaagctggcgctgcggcgcaagaaggtgctgagcaccgaggagatggagctgtacgagctggctcaggcggcgggcggcggtatcgaccccgacgtgttcaagatcctggtggacctgctgaagctgaacgtggcccccctcgccgtcttccagatgctcaagtccatgtgtgccgggcagaggctagcgagcgagccccaggaccctgcggccgtgtctctgcccacgtcgagcgtgcccgagacccgagaggcctcctttctctctgccaggaacagtagcccccctgcaaggccctcgttttcctccagcccgcagcctgcggcctctctggttatgctccacagcccagctgccacacactcacctctctctccaggccccccgggttccctccgcctctcttgctgcctgttctctccttttgcaggttgcgtttattggcttatctctgggggttggtgctcttccttgttttcatggaaactgcatggccccaagaggcccaagcagctttgagctgcaagggcaggatcatgcaggccaccgctgccctgccgcttagccacagggcactatttctgactcggtttattagagacatggtgtggcagtctctagaccccacagtcgggctggcatccggggacaggaccaacatccccacaccccagaggcgaactagtggtgagtgtaaagagcccctctccaggggaagacagccagccgggtgcagtgtgctctgctggagagcacagccccaggcgtgacaaacgcctcggcctcttagaagttgtcccctacctggacaggaagtctggaggctgaaacagagactcccaccttcccagagtctgccaggcagtgccacacagatgccatgtgctggtcccatggccacactccagcactcagcccccttgcccgcctcactcctgagttgggacactttccaggtgtcaccaggtgtgatcaggggcctgtgagagcccaggggtctttggtcgcgcctcctgcatgagcctcctgacagcggccacctcactgccacccagagctcaggcccaagagagggtggagagggcctgaaggacaggcctggagtaggggtgtatggactgcaggctgagatgagcaattgaggggcaagtgtccagcaggagggaaaaactgggaacagagttcttgtcactccaggagatgttgctgctcacttagcactcactcagggctctgggtgccaggcctagctctcagggcagagggcgtggcagggaagtgagatgatcacactcagtccagtgagaggcagtgaggaaaaccaccagtgagaccagtgtgctggctcacacctgtaatcccagcacttcgggaagtcaaggcaggtggattccttgagctcaggagttcaagatcagcctgggcaacatagcaagaccccatctctacaaaaaatacaaaaactagccaggcagggcccggcgcggtggctcacgcctgtaatcccagcactttgggaggctgaggcgggcggatctcgagctcaggagatcgagaccatcctggctaacacggtgaaaccccatctctact

SEQ ID NO: 7588 - DNA, 469 bp, Homo Sapiens
  XM_943444
tgtcagatgcgtctctgctgacctgagtctgccctgcaccatggacctgcattttccctgaagcatctccacgacggatgagatgactggccatgggctgagtctgagcttcaggacccatgtgcaggcagggattaaggtgcagagggacggccaaggatgcaatgggcaccgaggaggcaggaaagactcagagctcagcctgggctgcacagccaggtgtcaggtgcgtctctgctgatctgagtccaccctgcagcatggacctgcatcttccctgaaggatctccagggctggagggacgactgccatgcaccgagggctcatccatccacagagcagtgcagtgggaggagacgccatgacccccatcctcacggtcctgatctgtctcgggctgagcctggaccccaggacccacgtgcaggcagggcccctccccaagcccaccctctgggctgagccagg

SEQ ID NO: 7589 - DNA, 457 bp, Homo Sapiens
  XM_943550
gacattttggaggaaacagacttagcttctttggaactgcatacacagtggagaagaagacagaaaaggctgtggcctgatgaagcttacattcagacagacaactcacaattctgatgactggaaagtccaagatcatggcactggcatttgctcagcatctggtgagggccacgtactgtgtcaagacatggtagagacatggaaaggggctctaccgagttgctggaatagttggtgtgtgtcagatattatcgtaagacttggggaaggtaatcctgggctttacaagatgagtggagagaaaatggctctatctaattggcccttacacagagaccagcccgcttcatagttcaagatataaacctgccacacatatgaatgtaaacagctgtagatacagagtattttacaattgcacgctttcaagttattaaaatttctggatttgttt

SEQ ID NO: 7590 - DNA, 3071 bp, Homo Sapiens
  XM_943551
aaaagggaagggaatggggggagctagccaggtttgtgacccattttacttctgggaaacagactcagagagctctagggacttgtccaaggtaatacaggtaacagccagaatctaaaccaatgtctagtttttctacagagtgtgtttttactactgataattcagtgcctccaaagtcaggcagagtctctgctatgggaaaggcaagatgtaaaccacgatgactttctagcttttcctcagttcagcctggttcagcagcgtgttggcctctgtgtgggtgcacaataggaagaatcaacatagctctgcctcagcctacttggggttgtggggagggtcttaggtaaaccaattcctccctaagcctcagcttcctcatctgtaaaatgggggttggctcctctctggcattctgcgagtgtgccaagccacgtggtattcctcttgttcccggggagcctgtttgatgtggggtaccctggaggctgcagggctgacggctctcctggctcattaaggttccctacggagaaatactggttttgtgtttgaggttcgaatttgtagagcaataggggcactaataacgttgggcaagcagaccggtgggccctttgaagtctgaagaatcaacgcgcaaaagggaggaggtgagcaggtggtcgttcaaacgtcaggcgagggcaccagctggatctggaggaactgagacagtgaaaggaaagcaggcaaggttctagtctgggatatgcacgaatcgcggtctcccttccctctctatgcctccgcagtccttcccgttcccaaaggaggaacagcccgagggctcctggagcaacggaaggaggactggatgcggggaagggcaaagggcgcggaacggggtggggagtctgcgggcgagctcggaggacactggcgcacctcccccgccggctcacggccgcatccgccacatccgaaggcgccgcgacttcccggagaccccgaagcgtgcgctctcatccgggtcctgcgggcgctggcggaaagaggcgaggcggtgcctccgggggcggggcctccttcggttggcggcctcgggcttcgggagtcctccaagaggccaggtgaggccgtcccgtgatgccccgcgccccggccgctctggcctgcaacgtgtctctggggcggaggcagcggcagtggagttcgctgcgcgctgttgggggccacctgtcttttcgcttgtgtccctctttctagtgtcgcgctcgagtcccgacgggccgctccaagcctcgacatgtcgtacaactacgtggtaacggcccagaagcccaccgccgtgaacggctgcgtgaccggacactttacttcggccgaagacttaaacctgttgattgccaaaaacacgagattagagatctatgtggtcaccgccgaggggcttcggcccgtcaaagaggtgggcatgtatgggaagattgcggtcatggagcttttcaggcccaagggggagagcaaggacctgctgtttatcttgacagcgaagtacaatgcctgcatcctggagtataaacagagtggcgagagcattgacatcattacgcgagcccatggcaatgtccaggaccgcattggccgcccctcagagaccggcattattggcatcattgaccctgagtgccggatgattggcctgcgtctctatgatggccttttcaaggttattccactagatcgcgataataaagaactcaaggccttcaacatccgcctggaggagctgcatgtcattgatgtcaagttcctatatggttgccaagcacctactatttgctttgtctaccaggaccctcaggggcggcacgtaaaaacctatgaggtgtctctccgagaaaaggaattcaataagggcccttggaaacaggaaaatgtcgaagctgaagcttccatggtgatcgcagtcccagagccctttgggggggccatcatcattggacaggagtcaatcacctatcacaatggtgacaaatacctggctattgcccctcctatcatcaagcaaagcacgattgtgtgccacaatcgagtggaccctaatggctcaagatacctgctgggagacatggaaggccggctcttcatgctgcttttggagaaggaggaacagatggatggcaccgtcactctcaaggatctccgtgtagaactccttggagagacctctattgctgagtgcttgacataccttgataatggtgttgtgtttgtcgggtctcgcctgggtgactcccagcttgtgaagctcaacgttgacagtaatgaacaaggctcctatgtagtggccatggaaacctttaccaacttaggacccattgtcgatatgtgcgtggtggacctggagaggcaggggcaggggcagctggtcacttgctctggggctttcaaggaaggttctttgcggatcatccggaatggaattggaatccacgagcatgccagcattgacttaccaggcatcaaaggtagcttttttggtgggcataggatgtagatcttacatgagggactttggccttgttacatgttgtgaaggcgttttggtgggagccagaggaaagcagatcaagtgaagagtgaaagtcgtaacaacagatcagaagcttaaacatatctgaaagtataaaagtaaactttagaaaaaaaaaaaaaagaaaatactactgatcaaaattggtagtggaatagaggactaggggattaaaagattataaattaaaattaatgttgtttatatgaggcaaccgatagaattcataaagaaaggagagactgaggatattttatgaagatataagtataaatgtggtttctagataaaaaatataaatcttcctaaattccaggagaattttaataaaaaaaagatcagaggctaggcgaggtggcgtggctcatgcctgtcattacagcactttgggaggccaaggtggaaggattgcttaagcccaggagtttgagaccagcctaggcaacgtagacctcatctctataaaaaaaattaaaaattagccaggggt

SEQ ID NO: 7591 - DNA, 1026 bp, Homo Sapiens
  XM_943677
tggcccaggagggaggaggacgacgtccctcccgaagagaagaggctgcggctgttgctggaggggggaagcgcacagcccgaggacggggaggacgcgccgcggccgggcagggaggagaccggcacccagacaggtggcgacggcaaaggagcggaattctccacgagttttgagcagcctcggttttcccaccccctccaaatcatggaagaaacagggtaagagcaaagacaaggtggctgtggcctatgtctaccctctcggggcgtcccttgtcttctctcctccttgggcagggagaccatcggagtgcaacctggctggggcggggaggaggtgcagggcctggccagagcgggcctggccacgggcaagggacagcgacctcctgggccaggacaggtgagcgcggcgcaggcccgggcccggcgtgtccgcgctgcgcgggagaggccagcagagggcgccagagagccaggagcggcccgcggaggagcccgcgcccgccccgatgcccagctccgcgcctcgcggacccagcaagctcgcgctcagacgccccagctccgccgagaggacgctcgccccgggtgcttctttttccccaagtgcaggcagagcccctggagccatggccagcccttccggcagctccgaagccactggcaagccccgaggcagggatggccggcccaggagggaggaggacgacgtccctcctgaagagaagaggctgcggctgttgctggaggggggaagcgcacagcccgaggactgcgaggacggggaggacgcgctgcggccgggcaaggaggacaccggcacccagacaggtggcgacggcagaggaataaccttcactcttctctgcaacgaatcccaaaagtgtgtagttgagctgactgcaaggtgcttgacacgcaagagattccacaaatgggattcggcctctggaaagtggtggtagttccagatttatgtgaatgttactttgtttttccctataaaatctattctttaaac

SEQ ID NO: 7592 - DNA, 2448 bp, Homo Sapiens
  XM_943793
tgctcctgtcgccatggccccggcctcggcgctcaagcgaccctctcgctccgcccagacccctggatgcccagctgccgcacctcccgtggccccacgctgtggctacgtgttgtctgaagacgcctggggaaaccttcagggcctctgtactggcctgtcatgtggtcaaccagtgtgaacatcgaggtgtctgggttcatggaagctggtgaagaaaccacctacaactataccatgtcctgtccctatttcacatgggcctcgaggaagattctctgaagggaactacatggagatctccttgattgcacagtcaaccccgctcctgtctgtcaggctcaggaaccacttacaagctatggcaggtgatgttccagcatcccacagggaggattatgctggtgagccacatggccaagcaggactatggcttcaacagctctggggcctgcatgttcctgcattagccctactccagcaatgaggctgaagttaccagagtgacatcatggtatctggtgcaagctatagcatccacctattcttggagcacacgtggtcagacactgattggcatgtgaccaagttgatggtggtcaaaacagaactcctttcatgcccacaagcttcagtattactatgttccctgccacttccgttgaagttttgcaggattgggatgatcctttggtgtgaacgaagccccaaagaggaccacgtggagagtgcctgactgttcctgtgatgtcttctagtacatgaacaggaatgaaacccactatgtcctccatgtgaactacatgctgagcgtgggtccagatgggaaaccattctcctaccctgcagaaatggtatatagtttcaaggatgtgggtaagtacaccaagtgaggtgctggtcctggactcatggatggtcttggtacccaacaagttacactggctctgtccaaacaacagctgtggaagcccctcccatgggaggggggtcccactggggctacacagaagtaactcctcacaagtggcttgtctgcatcctgggattggaaacccagtatagaagcagctgttggcagactcatgaagtaatacagagaatgggtggctgctcatacaatcagcagtaagacttcacttaaatcatgccaggaatgacatgaacaggactcaaagtaccccatacagtcttccctcccaggtgccaccacccctgaaatattaaccttggtagacttctcctgtcaaggtcacagtaagggtagccagtggtatcaagaccttggtataaatcagacatggccttcttcccagcaaggtcattaggtacccaatgtagagatagcagggaaaggatataaaaacaggaaagttccaggtgagtcatcttttgccccttgactaggcctgcctataggtttgacagctccaggaagtaagaaaacaggtatattgtcttccttcctatagctctgctaggtgtcatcctcttaaggtcactaggattctagtgttgaaggcttgctgccacacagatggcactgttctatcctcaaagcattttcagggtgccatctaatgggtctgaatcctggttccattgcaaactttaagcaaggaacttagcattatccaatccccattttctccaactactggccccctctaaggaggctgaagagtgaaagcatgttgaacaccaagatgctctccaaagatggagtccttctcttctgagccccacagctctgcaagatgggtaaaactcaaggtggcattaggctctgagaggagctccatcacacagctggcatagtatggagctggaccagagcccaaatcccctatctccccactgtcctaaccaaaagcttacacttcagaacccaaggccgtgaacacagacctcacacagctgtaacctgagaaactgccattgctgatctagtgccagaaccgcttccccatccctggctttcctgctgacttcccacgagataagacttttctttaaaaagggggccttctcagccacacgcagtggatcacactgtaatctcagcactttgggaggccgaggcgggtggatcacttgaggccaggagttcgagatcagcctggccaacatggtgaaaccccatctctactaaaaataccaaaaaaaaaaaaaagcagggcatggtggcatgtacctgtaatcacagctacccaggaggcacaagaattgcttgaacccaagatgcagaggttgcagtgagcctgtttgtacccctgcactccagcctgggtgacacagtgaaaccctgtctcaaaaaaaaaaaaaggagcctttggccaggcacagtggctcacacctgtaatcccagcactttgggaggctgaggcgggtggatcacctgaggtcaggagtttgaaaccagcctggccaatatggtgaaaccctgtc

SEQ ID NO: 7593 - DNA, 3118 bp, Homo Sapiens
  XM_944019
gtgaagtgaatgccaagatatcatttcccctaacgctcttaaaaaactctcaggaagagcaatttagaagatttttaggaaactgtttatgatgccatttgcaagattgaggaaggttgtttttgcttcacattcttaaacaaactaaggtatttcctttgtaaaaagtaattacaggatcttaactcttgcctcagtttgtctaattttgctcctgtctccaactccccagggtgccgtgttaactccctcaatggagcacaccatgtcactacagcccgcatcaatgatcagccctctggcccagcagatgagtcatctgtcactaggcagcaccggaacatacatgcctgcaacgtcagctatgcaaggagcctacttgccacagtatgcacatatgcagacgacagcggttcctgttgaggaggcaagtggtcaacagcaggtggctgtcgagacgtctaatgaccattctccatatacctttcaacctaataagtaactgtgagatgtacagaaaggtgttcttacatgaagaagggtgtgaaggctgaacaatcatggatttttctgatcaattgtgctttaggaaattattgacagttttgcacaggttcttgaaaacgttatttataatgaaatcaactaaaactatttttgctataagttctataaggtgcataaaacccttaaattcatctagtagctgttcccccgaacaggtttattttagtaaaaaaaaaaaaacaaaaaacaaaaacaaaagatttttatcaaatgttatgatgcaaaaaaagaaaaagaaaaaaaaaaagaaaagaaaacttcaattttctgggtatgcacaaagaccatgaagacttatccaagtgcatgaccggatttttgtggttttgttcattttgtgtttaatttgtgttttttttttccagctgtatgaaatgggctttctgaagtttaaatagtccgacttcacccatggtgttctgtgcttgcagtgcgagtgttgctgtaattcagtgttgccgtcagtgtctcttttcttagctttctgtctttctttcaacgtagtgtgaagtgtcttatccttttctatgaattccaatttgccttaactcttttgatgctgtagctgtttcagtaaaagttagttcaaactaatgatgtagaatgctttgaccaaatgagctggtctattatgccttgtaaaacagcagcatagggcttttaaaaggtagtcaataaaagttgctgaaattttggcttttttaaatatgtagtaggtgtttttaatgatttttcacataatgtgtaaggtagtgaaatgcaagaagggaaaaatgttttgtgtgaaacacattttctgactggggaacttttattagggtaaattgtttgtaaggctgtacgccaacagtttcctctgatagtttgactgatttaggatatctgctgtatgatgcaatgtaaagtcttttttgccttttttcaggaaaaaaaaaaaagctaacttgatgtactagatttagtgtaggtagtgttggggttggggatgggggtgggggaggggagtcactgaatgttttgtccttcctttatactaatgatagtgctttagaatgagaattatgcctgaaatctggcaaaccgaaaaatgttgctattgcaacaaagtggcaaaagctaaaagtaaggatttatcttcaaacataagctgagataacgaatagaagcaaaacgattggctactagctctctctctctctctctattaggtaaatttgaaaaataaaaatgacttggcacttttaaaggtaacttcaccaaagaccgaagagccagtaaccagtagctccaacttgtctcagcatcacatcttctgtgctctttatttttgccggaccagtttgcggttaggagaatgtgccttttttgtacctttgcatttaggttttataattttaattgatgtatggacacacacaaacaaaaaagcatgaaggaagatttggatccaagcagtgccacactttacatcatcactacaagtgttcaagtgtaaagaaaaccaattttgaaactatgaaattcctgattcataaatacacagttatttctactttagtacatataagataattcactgttattaaagctcttttattaaggcaattgcatatgttttaaaagcaatggtaaattaagttgtcttccaaaactgtgtacttgtctggtcagctgtgtatgatcagttatctacctcagagtctattttcttttgtgctgggacaggttgctggccctccctgtttccacagaccaaatcctcctagctcaggagctagggctaagcagttatttctttcaagtattttttagttcttaaattttatgcttgtatttgatgatagatgtcagtgacatttcatagtttcaaaagtccttgctgctctgagaagtgtagattctagtgaaaattacatagtcataagagaaatgtgtttttgtttttgtttttgtttcatttttttaaagttgtggtattattggttctatgctccctggaatattactgctttgtgaaagtccagactgaacgcagcaccctctgtgtacctagtacagttataaacctgggtctctcactacttgatatttttgcattagttaagacagaaatttgatagctcggttagaggggaggggaaatctgctgctagaaatgtctgaactaagtgccatactcgtctgggtaagatttgggaaacataacctctgtacataaaaaaaaaaaaatcagttaaacatcacatagtagacagccattaaattataaaaaaattaatttatgaagaaagaccttttgtacagattgaaaaaaaaagattttcatagagatatctatatgatcaagagagttaattttttatttttgttttactagtgccacagacttgccagtggtaacttatttgtccggttcaagataactctgtagttttctttcctaggacttgttgttaaacgccaaaagacatttttgaactgtacatttgatcagattgttagcttttctgttttatttcttttgagaacctttgaataaaaaacatctgaa

SEQ ID NO: 7594 - DNA, 7940 bp, Homo Sapiens
  XM_944061
tttacaggacctatctgagtttataactgtcacctttttatcttggttcttcactatactttaagctaaaacaatagcagaggtgttgtcttacctgcagaccttactataatatcttccactttgtaggcactcaatatgtacatacttgttcaacatatgaatgaatacatgttaaaaatgcacagtcctttatatccaaaaatctactcatgtattttatctctactttgttttttcctggttacagattgtgttcacctattgaaaattaaaaagacattttgtttatgtaaaagattaacagaacttaaagataatcactgtgagcaacttagagtaaaaattcgaaaactgaaaaataaggctagtgtactacaaaagagactatctgaaaaagaagaaataaaatcgcagttaaagcatgaaacacttgaattggaaaaagaactctgtagtttgagatttgccatacagcaagaaaaaaagaaaagaagaaatgttgaagagttgcaccaaaaagttagggaaaagttaagaatcacagaagagcaatataggatagaagctgatgtgacaaaaccaattaaaccggctctcaaatcagcagaggtggaattgaagacaggaggaaataattcaaatcaggtttctgaaactgatgaaaaagaagacctgctgcatgaaaaccgcttgatgcaagatgaaattgccaggctcaggctggaaaaagacacaataaaaaaccaaaacctggaaaagaaatacttaaaagactttgaaattgtgaaaagaaagcatgaagaccttcaaaaggctctaaaacggaatgaggaaacattagcagaaacgatagcctgttatagtggacagcttgctgctctgacggatgaaaacacaacgctccgttctaaactggagaagcaaagagagagcgggcaaagactggaaacagaaatgcaatcataccgttgtagactgaatgctgctctatgtgatcatgatcaaagtcactcatcaaaaagagaccaagagcttgctttccagggcacagtagataaatgttgtcatttacaggaaaatttgaattctcatgttctgattctttctctgcaactttctaaagctgagagtaagttcagagtcctcgaaactgagctccattacacaggagaggctctgaaagaaaaggctttggtttttgaacacgtgcaaagtgagctaaagcaaaaacagagtcaaatgaaggacattgaaaaaatgtacaaaagtggatacaatacaatggaaaaatgcatagaaaagcaggaaagattttgtcaactaaaaaaacaaaatatgttgcttcaacagcaactggatgatgctcgcaacaaagctgacaatcaagaaaaagcaatacttaatattcaagccagatgtgatgctagagtagaaaaccttcaagctgagtgcagaaagcaccgtcttttactagaagaagacaataaaatgttggtcaatgaactgactcattcgaaagaaaaagaatgccaatatgaaaaagagaaagcagaaagagaagtagctgtgagacagcttcaacaaaaacgagatgatgtcttaaacaaaggatcagcaacaaaagctctgctggatgcttcatcgcgtcactgcacctatttagaaaatgggatgcaggattcaaggaagaaattagaccagatgagaagtcaatttcaagaaatacaggatcaacttacagctactataagatgtactaaggagatggaaggcgacgcacaaaagcttgaagtagaaaatgtcatgatgagaaaaattattaaaaaacaggatgaacaaattgagcggtttgagaaaatcctgcagcattcaagtttgatgctgcaggtgtttgagagctagatgaagatatggacatttctggaattacagagccccctctacattgagcacaagacagtgacgaatccacattcttcagccagaaagtcacctctgagagccaaatgtctgataatagacaagagagtcagagaatgataacgacatctcaggaaaattgtgaaaataatcagcaaccgtatgtggataaccctttcaaatttctcctggggcctccagccacccccactggtgttctcctgctgacagtgatttcagttttttcttggctggagctccctgatggaggggcaggccatcatgtttgctgtttttgcaacttaaccacttcaaccttcagtctttggagtgtccaaggagaccaggggctgatgtggaccctcagcatagcacagatgctctataaaaatgtggtcagactgctttttaagcactttcccaatgtcattccgcctcactgggcaaaaccccctaactggggtctccagctacctcctacaggtgtgtttgggccagcaacaagttcattcatacctccctagggcaaagcttccaaagggagcagtaggctgccaacttttctgtttcacagccttcactgatgataactccaggtactggaaaatctgaggctactagagactgaagtgggccctgggcatactgcagcagccctatggaaaagtggccagactgttacctgggttcccattcctgtatcttctcactaggcaagtcttgcaggcctgggcctctacctaacccccctgccagagctgtcgagccagtagcaactcagccactccctggacagagcctccaggggcaactgaaagcctctctgccactgcttctgcagtggaactgtccttgctaccctcagactgatgaaggagctaacacccttatctacaccttcaacaagctttaattgaccaaagcccatctcccacgggttttacacactccccactgctcataacagacagggaacccctggattggcccccacagcatgaattctccatcctgcttgctgattgcaataaacagttgctgacctgtattctccgggggtagaaccctgaggagacaaacaaaagacccttggctacaaccactactaatgtcccttcctcttcttccccaaagttagggaagaaatataaacactgagattgccccagagctgcagtgggcagcctaggagtgccaagccatgatctacagccagcactcaaggaggagagaagcacattttcagatcattgagagtgaacatggctgcaactgtgaggaaacataggggagccacatgaccaagcaagactctaccaactgaccagtaagcccaagtgccacctactggatcacatcccaaagcttcagcaccaaaaataccttactaatatactcccctctgaaaccagaaatgagaagtcagcttcaaataaagaacctgcacaaagcctcagcctggtgaaaacatctgaaaataagtctacggactgtactcaatctacactgcaattaaaggaaaacccataggtggaaatgagaagaaaccaatgcaagaactccagtaactcaaatggcctctgtgtcatatgtccttcaaacaaccacaccagttctccaacaagagttcttaacctggatgaactgtctggaattacataaatataattgagaatatggataggaaaaaaaatcatcaagactcaggacaatggcagaacccaatccaaggaaaataagaataacaataaagtgttataggagctgaaggacaaagtagctggtataataaaaaaagaaactaactgatctgaaagcgccaaataacacaatacaagaatttcacaatgcaatcacaagtattaacagcagaaaaaaccaatctgaggaatgaatctcagaacttgaagattggttctctaaaataagatggacaaaaataaaaaagaatgaacaaaaccttcaaggagcatgggattatataaagaagccaattctacaaatcactggcatctctgaaagggaggtggagaaatcaaataacttggaaaacatttcaggatatcatctatgaaagcttccctaaccttgctggaaaggccaacagtcaaattcaggaaatacaaagaactcctacaagattctacacaagaccatcctcaagacacataaacatcaggttttccaaggtcaaaatgagggaaagaatgttaaaggcagccagagagaaaggggcaggccatctacaaagggaaccccatgaggctaacagcagatctctcagctgaaatcctacaagccagaagggattgggggactatatttaacattattaaagaaaatcttcaaccaagaatttcatatccagctaaactaagcttcctaaatgaaggagaaatgagatcatttacagacaagcaaattctgaggtaattcattaccaccacatctgccttacaagagattttagaaaggaggactaaatatagaaaggaaagaccactacacactaatacaaaaacatacttaaacacacagaccagtgacactataaagcaaccacacaaacaagccaacataataaccagccaacagcacaatgacaagatcaaatctacacaaatcaatactaaccttgaaagtaaatggacaaatgccccacttaaaaggcagagtggcaagctagattaaaaaaaaaaaaaagcgagacccaatggtatgtcgtcttcaagagacccatctcacacataatgacactcatcgtctcaaactaaaaggatggaggaaaatctaccagacaaatagaaaacagaaaaaaagcagaggttgcaatcctaatttcagacaaaacagatttcaaatgaacaataatttttcaaaaagacaagggggcaggggcaagatagccaactagaagcagctgcaattcgaggctcccactgagaagaactaaaacagtgtgcaaatcctgcaccagcaactgacatatccaggttctatgatcaggactgactaggtagttggcatggcccatagagaacaaggaaagatgggctggtggattggcccacctgggagccacatggggcaaggggagccctcaccctcagccagccaagggaggcagtgagtgagcatgctacccagcctgggaaactgctttttccatggatctttgcaatccacagatcagaagatcccactcatgagaccacaccaccagggccttgggtgccaactacagagccatgcagattctcaacagccactcagctggagtctgcctaaaaagttggggagggttgtcatcatcactgtggctgcctgctgcctaaaccctctgagttccctgggggagggggagcagtcatcactgtggttgctggctgcctaagacaactgagcttcccaagagaggggcagtcatcatcactgcagctgcctgctgcctgaggaaactgagctccccaagaagggacagcagccatcactgtggctgctagctgcctaagacactgaactcctggggaggaagggcggcagccatttctacagagccaggctgctgtttttcctttgctgatgccagggagactggacggcttggtcccaagaggtattccccacagcgcagcatactggctgtggcagatcatggccagactgcctctttaggctgaccctcacccatccctcctcactgggtggggcatccctgcaggaactccagcaactcaagccagggaattagggagagaactctgatctctctaagtctgagtccctagcaggaggggtggctggctgttgtctccacaaaccagaagacttattctttccccctgctcactctgaggaatccaggcatcccagacgagtgggatttcccccagcacagcatacccccttcacaaagggacaactaaagtgcttcattaagcaagtcctggatcctgtgccccccaactgggtgagacaccccaatgggtcaccagacaccttatacaagagcatttctactggcatcaggtgggtgcccctcaaggacagagatcccagaggaaggagtggggtctcatctttgctgttctccagcactctctggtgacatcttcaggtgtgggagggacccagataagtagggcttgaagtgaatccccagcaaactgcagcagccctacagaagaggtgcctgactgttcaaaggaaaacagaaagcaacaacaacatcaaccaaaaagtccccacgaaaacctcatctaaaggtcagcagcctcaaagatcaaaatgagacaaactcatgaagatgagaaaggaatgaaaaacccctcacaactcaaaaggccagagtggcttgtttactccaaatgatcacaacacctctacagcaagggcacagtgctgggaggaggttgagatggatgaattgacagaagtaggcttcagaaggtgggtagtagcaaacttcactgagctaaaggagcacgttctaacccaacacattggaacgaatcccagaacttaaagattggttctctaaaataagacagacaaaaataaaaaagaataaaacggaaggaacaaaacctccaataagtatggggttatgtatagaggccaattctacaaatcactggcatccctgaaagggaggtggagaaatcaatgcattgggttagaacatgctcctttagctctgtgaaatttgttattacccaccttctgaaccctacttctgtcagcaaagaagctaagaaccatgttaaaaggttacagaagatgctaactagaataaccagtttagagaggaacataaatgaccggagccaactataaagcacataaggggaacttcgtgatgcaaacacaagtatcaacagctgaattgatcaagcagaaaaaagaatatcagagcttgaagactatcttgccaaaataaggcaggcagacaagattagagaaaaaagaatgaaaaggaatgaacaaaacctcaaagaactgtggaactatgtaaaagaccaaacctatgactgcttggactacctgaaagagacaaggagaatggagccacgttgggaaaacacacttcaagatatcatccaggagaacttccccaacctagcaagacaggccaacattcaaattcaggaaatccagagaaccccagtaagatactccacaagaaaatcaaccctcaagacacatagtcatcagattctccaagatcaaaatgaaggaaaaaatgttaaaggcagccagagacaagggcaggtcacctacaaggggaagcccgtcagactaaccgtgggcctctcagcagaaaccctacaagccagaagacagttgggtccaatggtcaacattcttagagaaaagaatttctaacctagaatttcatatctggccaaactaaccttcataagtgaaggagaaatccttctcagacaagcaaatgctgagggaatttatcaccaccaggcctgccttgcaagacctcctgaaggaagcactaaagatggaaaggaatcagaatgatgctggcctcataaaatgagttagggaggatttcctctttttctattgattggaatagtttcagaaggaatggtaccagttcctccttgtacctctggtagaattcggctgtgaatccatctggtcctggactctttttgtttctccacagacactacccaaagcagtccttcactacagtggcagacagacctgaaaattttcatctgaagcagcagagtgaactgcagagtcagagatagaatctcactatgttgaccaggctggtcttgaactcttggcacccaagcgatccttttgcctggaatcccaaagtgtcagatttactgaagaatatttcattgtaattactttttatactttataggtcaagagctctgttttaaagacaaaatttattgaatatactttttcaaacaaagtttcatgttctaatcattgtctgatttcagcattaaatgaaacacagtaaagaaagaaaa

SEQ ID NO: 7595 - DNA, 468 bp, Homo Sapiens
  XM_944064
atgaagggcaccacagcaacccctggatctctcaagaatgtacctgtttttaacatgctggatcaagtgtcagcactcagtagatgaggaaggggtagagcccgacttgtacagattccgcggatggtaaatggccctctggcgtgtttacaatacagctgtgcattcttaatggctctgccgctgccatgtcagctgtctgcttcagaaagtgagggctccaggaatgaggagaatcttcaagaacttcctcgcactgtgacatgtctgatcccttgctcccatccctgcagcatgaacaagattactctgtggctacgtgaagcatgaactggaggaggcaggagcaggagggctgaaagtcatacaaatgaaatcatacaatcatcgctgttttctgaagcatgtcctttagaagtacctttaatgaatgtttttggaagtaaactttcttattttttgtttgat

SEQ ID NO: 7596 - DNA, 1981 bp, Homo Sapiens
  XM_944097
ctcagcttctgttcctcaaccacggccgccgcgtggatgccgctgcattcggagtcgttttgccacttggtcccagcgccaggcttctcggtcgggagttgacctcagcctttctgtgacccagttcctggcacccagcaggcgctcggtggacggatgggtggcggaatgaaggacacagaggccactgcggggtctggcctctaagaggcttttacggcctcctccgtcactacctggcgagtgattcagcctgcctttttttttttttttttttttttttttttttttgtgatggagtcaagctctgtcgcccaggctggagtgcagtggcacgatctcggctcactgcaacctccgcctcccaggttcaagcgattttcctgcctcagcctcctgagtaactgggattacaggtgcccgccaccacgtccggctaattttttttctatttttagtagagacgggggtttcactgttttggccaggctggtctcgagctcctgatctcgtgatccgcccgcttcggccttccaaagtgctgggattacaagcgtgagccaccgtgcccggctcatcctgcttttggtttcaggtctccatgccagtgaaatgtcacctcaactccaccgtccctggtgtcaggcaagcccgagggacccaattctgcctttcttctggattttcctaacctgttaagagtcttgaaagtccttaaaccacgggagactatctggcacatgacacgggatgagacttggtgggggtcccacgggggacaggtccttccagcggttcctctgcacccagcgctgcacgggcacggggcgtgggtaatcagcctcccgaaagccacgcgagtcacggtcctgcctgcgaagaactcccagggcgaccttggggctgaggagtgggcctgcttcggccttctgctcttctgttgtgtggtgaccctcaccagaggacagcttcatgctcttggacttcccagcctcaagaacttcttgctctgttgcccaggctagaatgcagaggcaccatcttggctcactgcaacctccgcctaccgggttcaaatgattctcctgcctcagcctcccgagtagctgggattacaggcacctgccaccatgcccagctaatttttgtattttcagcagagatgaggttttaccatgttgaccaggctggtcttgaactcctgacctcaagtgatccgccaacctcggcctcccaaagtgctgagattacaggcatgagccaccatgcccggcctccatcttttactttcaatctatctgaagctttatatttaaggtgcatatattttagacagttaataatttcagcttgcttttttttttcctagttggggaaactctgctttttaattggattgtttattctggttacatttgttgttgtggtgaaatttggaaagttcaacctgccacaacgtcttcacttactatttttaaaggatattctcaatgagtgtgaatagtgagtcaacagctttctttcaccatttcacacatcctgagcctccattgttttgagtcagctgtcgttcatatctttgttacctgtgaatgcacaaaatttgctctgtatgatgactatgatgtgtccaggtagggttttctttacatttatttttatgaggggtttatgaactttttgaatctataagttgatgttttttcactacattttagactatatcaactttttttttctttcatcttttccagccatttcttcttggttctggttccgtgtgtaccgcatgatattgtaccacgtgtcacggagactcgcttccttgttttctttcagtttcattttcccttgcacttcagatggaatgatatctattgatctcttttcaagttcactcattctttcttctgtaatgttcaatctctcttaagaaagtccaaataaatttttcatttcagagagtggaattttcggttct

SEQ ID NO: 7597 - DNA, 930 bp, Homo Sapiens
  XM_944125
tgtgccatggcggagcctgtggggaagcggggccgctggtccggaggtagcggtgccggccgagggggtcggggcggctggggcggtcggggccggcgtcctcgggcccagcggtctccatcccggggcacgctggacgtagtgtctgtggacttggtcaccgacagcgatgaggaaattctggaggtcgccaccgctcgcggtgccgcggacgaggttgaggtggagcccccggagcccccggggccggtcgcgtcccgggataacagcaacagtgacagcgaaggggaggacaggcggcccgcaggacccccgcgggagccggtcaggcggcggcggcggctggtgctggatccgggggaggcgccgctggttccggtgtactcggggaaggttaaaagcagccttcgccttatcccagatgatctatccctcctgaaactctaccctccaggggatgaggaagaggcagagctggcagattcgagtggtctctaccatgagggctccccatcaccaggctctccctggaagacaaagctgaggactaaggataaagaagagaagaaaaagacagagtttctgtgagtgaggccagggcccttgggccctgggagcaggaagtgagttggaggggtaagcggaggcaggcaggactcttgggtgactcctgaaaggttaagaagaagggatagaaggactgttgagtttcatgtggggaatgaatcgcttggggaaaagaggtggcttaccccggagggtgacagtgaacccttcaggatcacccttgggagtggattctgagaccctagtaatgtgagcttaaggtatggttccaatccagcttccctgtcctctctgtgcttctctttcttcatctataaaaccccgttttatagcctgggaaacatagagagaccctgtctctac

SEQ ID NO: 7598 - DNA, 2548 bp, Homo Sapiens
  XM_944165
gatctcatggctgctctgtttgtattagtcacagtacatgctgtacatgaatttaaggaatatattgagcaaataaagttaaaatatagcaggaagtattcattatccaggggatgaatatgcagacattgtcaagggcaaaagtttatcattatattaaatcactatatagaattatcttaattttgtcataagtcaatttcttaccattgctttcttacctttcaaccaaggagcctagcatccctctcaaagcataatatttttagaaaagtccatctagtctcagctaatcacataatattctagagatgttgagaccagtgagatcaaatgaataaaataaagatatactatttcttcacgttaagtaatgtattagtcagcttgggctgcaacagaataccacagattttgtggcttaaagaatggaaatttattttctcacagttcgagaggctagaagtccaaggtcaaggtgccagcaaggttgctttctggagaggcctctcttcctatcgtgcaaatggctgctgacttgctgcgttctcacacgaccttccctctacgtttgcagagagagagggatgtttgttgtctcttccttatcttaagaggacaccaatcccattgggttagaatctcactttatttaaccttaattaactccctacaatctctatcttcaaatacagtcacaatagggagggagtaagacttcaacatttacattttgggaagtaacaatttggtctataataactaatttttgtctcagtcaattaagcagaagaaaacggcccattgctatgtttagggactctcacacgcaaggatgaccctgatcagaaaagacataatttaacactctaaaagtggcatgtattcaaaaatttttagaagtctttattactttaaaagaaggcaaattccatggtcctctgctaattgctaattcaagttccacttttcaatctgctctgccactcacccccgttcatcaacacaactgccactccaggcctgggaaactcttcatttgaagcctatttctctttcagtatgttcaaaacatagctccatttcaactttcaaaagcaagtaatgtcatgtggcaaaaattttattcatattattaatcatattataaatcaaaatatctgaaatttagtcctagctctgacattcagtgacactatataatctcaagaacaccatttaaacttattttccttccagctttcaacttttattattacttccagaagaatatctaggattaaaagacgataagcacttacatatatgtattggagaaatagtgacaaattaaactagtaactcatcagcaaatggttatggccttcaaatatagtgaaccattaagaaccatttagaagcataaatggacagatgaaagggacatgataatcaatttatgagaaccgtgatttaggcctgaataatatgcaaaacaagcctttaaaagttactggcgcttttccttgctacctgcagaggggtccatacggcgttgttctggattcccgtcgtaacttaaagggaaactttcacaatgtccggagcccttgatgtcctgcaaatgaaggaggatgtccttaagttccttgcagcaggaacccacttaggtggcaccaatcttgacttccagatggaacagtacatctataaaaggaaaagtgatggcatctatatcataaatctgaagaggacctgggagaagcttctgctggcaggtcgtgctattgttgccattgaaaaccctgctgatgtcagtgttatatcctccaggaatactgccactggagccactccaattgctggccgcttcactcctggaaccttcactaaccggatccaggcagccttccgggagccacggcttgttgtggttactgaccccagggctgaccaccagcctctcacagaggcatcttatgttaacctacctaccattgcgctgtgtaacacagattctcctctgtgctatgtggacattgccatcccatgcaacaacaagggaactcactcagtgggtttgatgtggtggatgctggctcgggaagttctgcgcatgtgtggcaccatttcccgtgaacacccatgggaggtcatgcctgatctgtacttcgacagagatcctgaagagattgaaaaagaagagcaggctgctgctgagaaggcagtgaccaaggaggaatttcagggtgaatggactgctccagctcctgagttcactgctactcagcctgaggttgcagactggtctgaaggtgtacaggtgccctctgtgcctattcagcaattccctactgaagactggagcgctcagcctgccacggaagactggtctgcagctcccactgctcaggccactgaatgggtaggagcaaccactgactggtcttaagctgttcttgcataggctcttaagcagcatggaaaaatggttgatggaaaataaacatcagtttctaaaaaaaaaaaaagttactggcaattttttttctgtatttcaaaaaaaaaa

SEQ ID NO: 7599 - DNA, 2555 bp, Homo Sapiens
  XM_944214
gtcgccccgtcgcccctcgcctccccgcagagtcccctcgcggcagcagatgtgtgtggggtcagcccacggcggggactatggtgaaattcccggcgctcacgcactactggcccctgatccggttcttggtgcccctgggcatcaccaacatagccatcgacttcggggagcagagctcccaagatggtggcaagccttttgttctctgacctggggttcttggcctcacggattacaaggaacggaaccttgggccatgcggtgagtgttatagctctgttagctctattagaagccgtgggtcacggaagagaaccgtggaacccagcaactagtgttcagcttgattaagatgaaccaggcacttagctgcacaggaacaatggcgagccccagcccgatcgggagcggcagtgggcgcctagctggatcagaggcgcagtggacaccctgccgaatctggaggggtggaagtcagcggcgggtctgcgatggcggtgatcagtgccggacggcgagcaaaagctcagctcgagccggaacaaacatggagcagaagagtgtgcagttgcaagatttaatagagtgaaaacagagctcccatacaacgggaggggacccaaagaggattgccactgccagctccaacacctgggtttatatccctatcattgtccctgtctgtgtgctctcaggcgatagatgattgacaatttctttacctcctgcttttagcctaattggtattttagtgagctctcttcactactctcttcactacctgattggttgggtgtgagctgagttacaagccccacgtttaaaggtgggtgcagtcaccttcctcagttaggcttaggaattcttagtcggcctaggaaatccagctagtcctgtctctcaacagaatctcggtccatcgccaggctggagtgtagtggcacagtctcagctcactgcaacctctgcctcctgggttcaggtgattctcctgcctcagcctcccgagtagctggaattacaggtgcaagccaccacacccggctaattttatttttagtagagctggggtttcaccacgttggccaggctggtctcaaactcctgacctcaagttatccgcccgcctcagcttcccaaagtgttgggattacaggcgtgagccactgcacctggcccagagtataaaactttgaaaacaaatttaaaattctaatcttttcctgtcattttcctagtgtctcgtaagaagccatggttatttgaaagcatatggtcttcccatattgagtaggagaaaatctctttatcctaagattgtcagagagactgggtccatatctataggcacaaaataaatagatctttactgtgccaatccatatgctttgtgctttggcagcctgagcagtagattgtcattcagctgacgtggccccatgcagtttttactaatccagaggacagctagaaggaccaggcctgcccagaccaggctcacaggaatcctgatggaagcctgaatgtgccctccttctcgacggcgacactttgtctgctgggcagccctgggaccttgctccttgtctttgctgcaacatgcaggttccggcgatttccgagtggaacctttctcccacagtcaggactcaatatagtcaggatgcactagcacagctgtttctcagagccacatcctcagcctccacagcaaaggagactttatttccaaaccagtaacagcccctttttcccccttagtaatctctgtgtttttactggctacataagcattcactttgaggtgccaacttttttctctttcttttccccaatatggatgaaaataataaatgaaaaattttgctctcattaaccagccactgtgtctttagtagtttactggctcccttcctggcctaagagcaacgctttttgcctttgatgcagcacccttcatcccataaggcaacctgtaagatggtcattttaaaatcaaaagctcgagtttcattgttttttttttttttttttgaggcagtcttacactgtttcccaggctggaccgcagtggcatgatcttggctcactgcaacatccgtctcctgagttcaagcaattctcctgcctcagcctcccgagtagctgggactacaggtgcataacaccatgcctggctagtttttttttgtgtgcgtgtgtgtgtttttagtagagacgcagttttaccatgttggccaggctgggcttgaactcctgatcccaagtaatccatccgcctcatgcttgtaatcccagcactttgggaggccgaggcaggcggatcacttgaggccaggagttcgagaccagcctggccaacacggtgaaaccctgtctctactaaaaatacaaaaaatttgccgggcgtggtggcaggtgcctgtaatcccagctatttgggaggctaaggcaggagaatcacttgaacctgggagatggaggttgtggtgagctgagattgcgccattgtactctccagcctgggcaacaagagtgaaattccatcacca

SEQ ID NO: 7600 - DNA, 2333 bp, Homo Sapiens
  XM_944246
aaaaaaaatagaggccgcgtgtgcagagcgaacgcctgcagcctccctgcccctcccacaacgctcgaccccaggattcccccggctcgcctgcccgccatggccgacaaggaagcagcctttgacaacacagtggaagaatgagtgatcaacaaggaatacaaaatatggaaaaagaacaccccttttctttataatttggtgatgacccatgctctggagtggcccagcctaactgcccagtggcttccagatgtaaccagaccagaagggaaagatttcagccttcatcgacttgtcctggggacacacacatcggatgaacaaaaccatcttgttatagccagtgtgcagctgcctgatgatgatgctcagtttgatgcatcacactacgacagagagaaaggagaatttggaggttttggttcagttagtggaaaaattgaaatagaaatcaagatcaaccatgaaggaaaagtaaacagggcccgttatatgccccagaacccttgtatcatcacaacaaagactccttccagtgatattcttgtctttgactatacaaaacatccttctaaaccagatccttctggagaatgcaacccagacttgcgtctccgtggacatcagaaggaaggctatgggctttcttggaacctaaatctcagtgggcacttacttagtgcttcagatgaccacaccatctgcctgtgggacatcagtgccgttccaaaggagggaaaagtggtagatgcgaagaccatctttacagggcatacggcaatagtagaagatgtttcctggcatctactctgtgagtctctgtttgggtcagttgctgatgatcagaaactgatgatttgggatactcgttcaaacaatacttccaaaccaagccactcagttgacactcacactgctgaagtgaactgcctttctttcagtcctcatagtgagttcattcttgccacaggatcagctgacgagactgttgccttgtgggatctgagaaatctgaaacttaagttgcattcctttgagtcacataaggatgaaatattccaggttcagtggtcacctcacaatgagactattttagcttccagtggtactgatcacagaccgaatgtctaggatttaagtaaaattggagaggaacaatccccagaagatgcagaagacaggccaccagagttgttgtttattcatggtggtcacactgccaagatacctgatttctcctggaatcccagtgaaccttgagtgatgtgttctgtatcggaagacaatatcatgcaagtgtggcaaatggcagagaacatttataatgatgaagaccctgaaggaagcatggatccagaaggacaagggtcctaaatatgtctttacttcttgtgattttagactccccttttttcttctcaaccccgagagtgatttaacactggttctgagacagattttattcagctatccctctatataataggtaccaccgataatgctattagcccaaacagtgggtgttttctaaatattaatggggggcttgattcaacaaagctacagagttatgttgaaattttcttcaggaattttctagtaacccaggtctaaagtagctacagaaaggggaatattatgtgtgattatttttcttcttatgctatatccccaagttttttggactcatttaagtaaaggctagagtgagtaaggagaatagagccaaatgaggtaggtgtctgagccatgaagtataaatactgaaagatgtcacttttattcaggaaataggggagattcaagtcatatagattcctactcgaaaatctcgacacctgagtttccaggatgcacattttcatacgtagaccagtttcctcttggtttcttcagttaagtcaaaacagcacgttcctctttccccatatattcatatatttttgctcgttagtgtatttcttgagctgttttcatgttgtttatttcctgtctgtgaaatggtgtttttttttttttgttggtgtgtgtttttttttttaacttgggaccgccaagttgtaaagatgtatgtttttacctgacaggtataccacaggtagattgtcaagttgagaagagtgaatcgataaattgtatttgttttaaaaattaaattaatccttgataagagttgctttttttttaggagtttgtccttgaccactagtttgatgccatctccattttgggtgacctgtttcaccagcaggcctattactctccatgactaactgtgtaagtgcttaaaatggaataaattgcttttctacattaaaaaaaaaaacaca

SEQ ID NO: 7601 - DNA, 2078 bp, Homo Sapiens
  XM_944302
gcaatcatggcgccacctgtgagatactgcatccccggcgaacgtctgtgtaacttggaggagggcagcccgggcagcggcacctacacccgccacggctacatcttttcgtcgcttgccggctgtctgatgaagagcagcgagaatggcgcggtaaaggaagcggcatgccatctcccctctgtttttcccttaggctgcccttgagttccagtccttaggcatgggcactgcggacgcgtctttagtgcctcagtggtacaatgttggtctcttagtttcttctagccgtatcgccgctgtggtgcacttagccaccacacactagttgtgttgatctcgcttggttgtgctgctgaccctcggggagggaagttgggacaaaagcagatgcgaactcagtatcccatcccagcccagctcagcccagcagtgagttgcatactgtatgaatgttgcttacctttccgactttatctagcgccactatctccacctcactgacgcaatctagtcatactgtcttttctgtgtttaaaagttataatcacagtctctgcttgccctttaaaaattttttataacatactagcttctttcagtgtcggtaatgcgccaagctttctcctgctacagagcctttgtaacatgccatctatctggaacgcttctatcttcctaggcctatttaattcctacctcctttagatagcttctctactatcacctcagagaagtccttctggacccactaattgaggaaaggagttttgtggggtgttttgtttttgtttgttttgttaaagactcacaaaaaactctgttccttttcttccaagcactatgtcagcatatgatgagacactcaggtatatgtttcctactagacttctcccctgcttaaatctaagtccgtgaaagcaggccctaccaccataccatccgtatatagcacaaggcagctcctcaataaatgttgaatgtgtgagtaatacctacctttctagtttcagagatagatccaggattagctcaggatcatataagcaatatttgaaggagcacaatagaaagaggattcagaattagaacagttacgttctggctaacttgactttgattctgctttgagtaagtaacttaagctgtctgattcaaggggctttctattcagtcattgttgggaatgttcttaacagtcctgagtttgttcatttcatagatatcacttgagtattttcatgtgtcaggcacagcgctgacttggtttctgctatcaaaggacacagacacaaattgtaaacaaataaatgctcaaatgagcatatggttacatatgtggtggtgctttgaaagaatattacagggcaccttgagaacatgtaacaggcaaacccatcctagtcagcagaagtgacatttaagctgaatcatctaaagagtaggtaagagtcaggtgggtggagagagtgcagctctggcagaaagaataggttgaagagagatctgaaagtgggaagaatttagtaagttggggaaactgaaagaaggccaggagagctgaagcattgtgagcaacggagagattgataaaagatgaggctcaaaatatctgtcttataccaacagccaataccatgctcaaagagaaaactctgcaagtattcacttaaaatagaagaaaacaagcatagccgctattatgtaacatttttgtggaaatttcagcctgtgcaataaaataagaaacagaaggaagcagtataactttggaggaaagagtaaattgtcggcagggcgcagtggctcacacctgtaatcccagcactttgggaagccaaggcaggtggatcacctgaggtcaggagttcgagaccagcctggccaacatggtgaaaccccatctctactaaaaatacaaaaaattacccgagcatggtgacaggcttctgtaatcccagctactcgggaggctgaggcaggagaatcacttgaacccaggaggtggaggttgcagtgaaccaagatggcacccttgcactccatcctaggcaacaagagtgaaactccatctcaaa

SEQ ID NO: 7602 - DNA, 1913 bp, Homo Sapiens
  XM_944417
gaaccccaggaaaggacggaacagaacaggacagggcccccagccccatctttatctcaccggctgctgctggctgccaagcctcccctgaatgggggagggtggtctgtgtgagtcagcggaggcacggagtggaggaagacgggagcctctgccgggcccgttgagcgtggcctcagaaatgcgccgctgggttagggtctccccgaccgaggctcgaatccaggtcgaagggtcgccggagcgatggttggagaatgtggaaggagctggaggacacccgagtattcttaaagcaatccccatggccaaaatcaacagctgatctggataccatcaagacacctgaaatcttatcatgagccagatgctgaggaagagactccgggaggatcccgaggacgccccagttgcagccatgttgagactgacgctgaggaggaccccaactgtcacgagcaacacctgtcgaacacagccacccacctggggacagatcaagaagctgtcacagatggcagaagaaaacctgaggaaagcgggacaaccagtcacaatgagtaatttcatggtagctatgatagcagttatcaccactgctgtgagtattccttcaacaagggctgacacagagaacaattatacttattgggcatatttatcaaccttggctggcaataatgcctagatgtaatcactctatgacacagttacacatgctttctgatctcagtatttaccataatctgctcctataattgaggcataccgcccttaaaaacctatttgtaaacaaaattgaacctggccagaaaaaatgaacgtacttgtttaggaagattgcattgcagaacaggcagaggtgctgcgcaacgattcctatggaatcactgttaattggtcccctaaggggatgtttagcttaaattgcacctctcagcctgcgtgccacggccacactatgtgcagctggtctgaacaaaacggtcagatggtagaaacaataagaagtatggcaaaagttcctattatctggaaccatgctggtatagtggcacctcaacctcaaacgataaggcccgctgtaggagctaaacattaaggatttgtagaaactattaatagctcttaataagatcaaaattggggaaagaataaagcatctagaaggacactctacaagctttttggatacagtaaaattaaaagaaaaaatatttaaagcatcccaggcacacctgaccttaataccagcaactggagtgcttaaaggaactgcagacagatttgcagctagtaacccattaaaatggataaaaatacttggaagctctgtaatttcaatgatgtgattgtgcttttaatctgtgttgtttgtctttgtgtagtctgcagatgtggatcctaactcctgcgagaagtaactcacagtgacaaagctgcctttgcttttatcgagttgcaaatcaaagaaggggggacatgttgggaacaggccccccaagatctggccataaactggccccaaaactggctataaacaaaatctgcagcactgtgacacgttcatgatggccgtgacgcccacgctggaaggttgtgggtttaccggaatgagggcaagggacacctggcccacccagggcggaaaaccgcttaaaggcgttcttaaaccacaaacaatagcctgagtgatctgtgccttaaagacacactcctgctgcagataactaaccagacccaccactttacttcggcccatcccttcatttcccataagggatacttttagttaatctattatctatagaaacaatgctaatgactgacttactattaataaatatgtgggtaaacctctgttggggctctcagctctgaaggctgtcagacccctgatttcccacttcgca

SEQ ID NO: 7603 - DNA, 547 bp, Homo Sapiens
  XM_944489
aaggggcggcaggtgccatgtccggccacgaaggtggcaagaagaagccaccgaaacagcccaagaagcaggccaaggagatggacgaggaagacaaggctttcaagcagaaacaaaaagaggagcagaagaaactcgaggagctaaaagcgaaggccgcggggaaggggcccttggccacaggtggaattaagaaatctggcgaaaagcaagctgttccttgtgcctgaggagatggtgaccctttatttcatccgtatttaaacttctctattccctgccataacatcttttgccccgtatagctggaataaagtgttatcttggagctgttgtacatttaagaataaacttttgtaaaaaaaaaaaaaaaatcttacagtggctcatcatctctttagttgttttcactaagtcattcctaccataactgtgaatttaaaagtaaaaccagctcagaatcttgccagagtctgctctttggtccttgttctaccctaaactttgtatcacctgaaattaaatcaactcctttgaaaaaaaaaaa

SEQ ID NO: 7604 - DNA, 2343 bp, Homo Sapiens
  XM_944593
gtgaaagtgaagctgacccttgtggacacacctggctttggggactcagtggactgctctgactgctggcttccggtggtgaaattcatcgaggagcaatttgagcagtaccttagggatgagagtggcctgaaccggaagaacatccaggactcccgagtccactgctgcctctacttcatctcacccttcggccgggggtctggtggggggatcctgggggctggcgcatttagggagggctggggggtctctgccccctgaggctgggcaatgaccaatccctgggtgcaggctccggcccctagatgtggccttcctccgggcagtacacgagaaagtcaacatcatcccagtcattggcaaagcggatgctctgatgccccaggaaacccaggccctcaagcagaaggtgtgagtgatgacctctgacctttgaccccatgtgaagccaaacctgatttcagcttagacttctttgatcttgaagtggcctttctggagcatggtgcatcaggctagattgtaggagaagcttctgaggaaggcgggtggtaagccgccagcatagccatgtctctgaaggctcaaaataggctacatatgcagcccccgggctagatgcctggctgaggcctatttgagggcaggagcatagacatgagaacatagtgacttccctctggcccccaccccgtgtcttcagagccctttcccactgtttctgcttatatctctctcggcctctctttctctctctctttttttttagatagagtctcactctgtggcccaggctgcagtacagtggcaagatcagagctcactgcagcctcgaacttgtaggcgcaagtgatcctcctgcctcagcctcttgagtagcagggactatagatgaacaccaccatgcctggctaacttaaaaaatatttttttggctgggcttggtggcagacacctgttaatcccagcactttgggaggctgaggtcagtggactgcttgagctgaagagtttaagacaagccacggcaacatggtaaaaccccatctctacaaaaagtacaaaaaccagccaggtgtggtggtgtgcacttgtagtcccagttactcaggaggctgagatgggaggatcacctgagcctgagaggttgaggctgcagtgaaccaagatggagccactggactccagcctgggtgatagagtgaaaccttgtttcaaaatatatgtgtatatttgttgtagagatgggatctagctatattgcccaggcttctcctggtctcttaatgtctgccccatcttagaatcttgtgtttctcaccatctatgtctctgagattttgtttttgtcttcctgtatgtccatctctccccatctctgtctttcatgtctttctctctgtctctgaccacccagtatctctgtgtctcactgtctctggtcatgaaatgtctgtcattgtggcccgtttcacactgtctctatatctgtttcccctgagatccgggatcagttgaaggaagaggagatccacatctaccagttccccgaatgtgactctgatgaagatgaagacttcaagaggcaggatgcagagatgaaggaaagcatcccttttgcagtcgtgggatcatgcgaggtggtgagggatggcgggaaccggccggtgaggggacgccgctactcctgggggaccgtggaggtggagaacccacatcactgcgatttcctgaacctgcgacggatgctggtgcagacacacctgcaggacctgaaagaggtgacgcacgatctgctctacgagggctaccgggcccacaacctcaggtcccgctcctgattcctgtccccttcccactgtcccgcagtaagctttcccgccagagcgccacagagatcccgctgcccatgctgcctctggcggacaccgagaagctgatccgcgagaaagacgaagagctgcgccgcatgcaagagatgctggagaagatgcaggcccaaatgcagcagagccaggcccagggcgagcagtcagacgccctctgaggccacgccccgcccggccttacctcggctccgccttcagtcggcctcttgtccaatccccgcgccccacactgcccagcgccccccgggacctccgcgggtgccgccctcgcgcgggctagggggaggttctcccagcctgagtccgtagccccgccccggcgctggtcccgcccacccagacaccgcccacttcccggcccggggcctgcacaatctccgaccgcatcactgtcttccggagtcccccttcttctcccagactctgtcttcaataaaaactgagcttcccg

SEQ ID NO: 7605 - DNA, 4657 bp, Homo Sapiens
  XM_944653
gtgaatttccgtttccggtggtgtccaatccgacctgaggagtcacagttgtgagcagattagaattacttgttattggtaaatagccactatggagactaaggaccagaagaaacaaagaaagaaaaatagtggacccaaagctgcaaagaaaaagaagcggcatctgcaggatctccagctaggagacgaagaagatgcctggaagagaaatcccaaagcttttgcatttcagtctgctgtgtggatggctcgatcctttcacaggactcaggatttgaagacaaaaaagcatcatattccagtggttgatcgaactccactagagcccccaccaatagtggtagtggtgatggggcctccaaagttggaaagagcactttgatacaatgcctcattcggaacttcacccggcagaagttgaccgagatcagaggccctgtgatgatcgtgtcaggtaaaaagctccgactcaccattattgaatgtgggtgtgacattaacatgatgattgatctggctgaagtagcagatctggtactgatgcttatagatgccagctttgggtttgaaatggaaacgtttgagtttctaaacatctgtcaagtacatggctttcctaaaattatgggagttctcacccacctcgacttcttcaaacacaataagcaactgaagaagacaaagaagcgattaaaacacaggttctggacagaagtttacctggttgccaagctgttctgcctttctggaatggtgcatggagaatatcaaaaccaagaaatgcacaatctgggccattttattacagttatgaagtttaggcctctcacatggcagacttctcatccttatatcctggcagacaggtaaaaaggtggaagatttgacaaacccagaggatatccaaacaaacatcagatgtgaccagcagatgttactttacggttatttaagaggagcgcacttgaaaaataaaagccaaattcacatgccaggacgaggtggggcccacccatgagctggtccagagtctcatctccacccactccaccattgatgccaagatggcttcaagtcgagtgatgttgttttctgattccaagccacttgggtcagaggctatagataatcaagggtgagtggtgtcattgagcaaacacgaagtcgggctcatccaaggatgagattttgccagagaaaggacgagcagcaagtcagggagcttaaggtaattatgggaaagtgactatctacaattgcttaggtagaaggagacagattggatttttgtgtgtttggtatttgggataagagggatgtgggtgtgtacttgacatgggttgttctctctctctctttttttttttttttttttgagagggagtctcactctgtcacccaggctggagttctgtggcacagtcttggctcactgcaacctccgcctgccgggttcaagggattctcctgcctcagcctcccaagtagctggggttacaggtgcctgccaccacgccctgctaatttttgtgattttttttttagtagagacgaggtttcactatgtaggcaaagctggtctcgaactcctgacctcagatgatccacccgcctcagcctcccaaagtgctgggattacaggcgtgagccaccgcacctggcctgtttattctcttaagagagaaaatgaggggattaatggactgtagttctggacaaggtggaaaactcttaaagtggaagtattggggcaagtgctctgacaggctaggatggtgcagtcagtcccttcacccagaaatcagtagaatgttaacagttcagactcaaaccttgtgaaaaacaggtggtggaaaggaaatccctcacagcaactggcaccataatcaagacagaatgtttgcagaataaatggagttacctgctttcagccccaggttgtagctattgtctgccctgatgatatgtgataataatttgtgatcctattgtcttaaaatggggtcactcatctccagtagaattaagtccacagtgaagttgtccccccatccccaaagagataaacatatatgaatgaactcacatgataacaactactgctgcctgggatcatgagagacctgaactgaactgataggaagtgaaaggtggctgagataatgagaatagacccatctgcagaggatcataaaaccagcaaagacaagatcttgtctaagatgccttcacaaactttgtccatgagaactctaaggacttctccagacctgttggctgctgctgtgatctctgcccaagaggagcctctgaccaacatccaaagggcttctggacccactggactcctctggaggtaccttggtctcccgatccatggctgtggttttttactccgtttatcactgcctgtgtgtagaatgataattgcacaattgatagtgtgaagacctcttgataaatggtgaatctgagcatatgtatttggctgacatgtcattgtgaaacctcacagcttcagtcagtgtcagcacagctagggagcatgtacctaatgcacatatcactgggcatagtctacaggcacctaataactcaggtaccttaacagtcactaatgagtgtctctccaaggtcaaaacaatggaagactgtagaagatgctattcattaagatatctcaagaatgtggaagactattattcgcttctcatgggacaggactttatagggcacctgaaaaaactcccatgaaaaatcacttttacaaaatgtcaagttatgatatccaagatgaaaccaatgagtcacaacattcacataatacactgtacaaccctgatctcttgactgtcatcaaatgtttcttacctctaaaccaaagtttcattttataatttaatttttctcattttttctgttctcttagcttaagaaaagatcattacaaactttttgtatgtttttcatatatgcttgcaaagggttgtaaaactttattgtgattattcttgctttaagctgaaacttccctaatctttctttagagattgtggcatagcatgttagtttcttttccatatccaattgttttctgtaatgaatacagaaatatgggcactattttgtaactttaaatagacatcatctcaagtctacaagaattatccaaaacggtatttaatgacatttctaggtcttcagacactattaatgtagattgtagcctctaggtcctgaggatttttactggatactggttactgaaactgagctttcttgaattctttttccttccactgtggtttcccgcatttcaacacatcacctatttttgtcctcaaacgttacttaaattttttccacagaattaaattaaatatgaatcatccctcctctgatttttgaaatgaccctttgcttcctatgataatgattcttctggtccgttttgtagttatatgttagagtttgtaaatattcacacattttgcaactgcatataattttctcattttttcctcttcctctaaagctgctgttatttcttttaactttttgtgggaaaaattaaacccatctttcactttgttgatatttataattgaactccttgatttttgcttgaattgcttttcaagttacccacttttagggaagacattatttgggttttgtttagtgtatcaggctttttttagttagttgtatcaagaagtgtagacttttctatacataatatcctttttcccacagtagttttttttttttaaagtctagccgggtgcagtggctcacgcctgtaatcccagactttgggaggccgaggtgggcagatcacgaagtcaagagaccgagaacatcctggctaacacagtgaaaccccgtctctactaaaaatacaaaaaattagccggacatggtaacgggtgcctgtagtcccagctaatcaggaggctgaggcaggagaatgacatgaacccaggaggcagaggttgcagtgagccgagatcgtgccactgcactccagcctgggtgacagagcaagactccatctcaaaaaaaaaaaaaaaaaaaaagtctgttaaaataaaggtcatcaaaagatcttttcctaaacctttcctttaccagaaatatctctagagtcacatggtcctttctcccttcttgcttttgtaggagtccaaagctaatctgtccctgatccggattgcatgcacctgtgccttttggggcccttctgcattagttcttccttctcttctaacctcaaaaatgtgttttctctgttggctctttccctttaacatagaagtatactcacgcttttgttgaatcttggaataaaagtcttcctttaccacatatctccctttaatactacatctctcttctcagccaaatacttgggaagacaagccctgagtttgtgtgattgttttctcacctccagttcactactttgaacaggcactgtgctaggtgctgctgttatagatatgaaaagaaggcatcatctcctttctaacaactcataggagcagccattcctgattcatacgcaggtctcttgattctcagtgctcacttttgcaagcttcacttaatgccgtgtaaatcaccctattctccaggtcttctttcttcccag

SEQ ID NO: 7606 - DNA, 1413 bp, Homo Sapiens
  XM_944786
cagcgtttgggtgaagacggaggcgggttctggacagacgtacgctgtcagggagtgtttactttgcctccacttctgttcctccccgccctggtgctgctccgggtcacatactcgtcctgagccggcttcagcctctccgcgcagaagtgtcccggagccatggccgagtactcttatgcgaagtctaccaagcttgtgctcaagggaaccaagacgaagaggtgggtcctgcacctccggcgggagcctcctcagttcttttcggacgcactccacccccctcgaatccggtggaagccgtggcgcggagagccggctttgtggcctcccaggctttgccctggcccctgtccgggctggactgaggccggaccgcggttcctggcgcctgtgcagagaggggcagcctcccgcactgacgaccctggaaacaggatagacgggcgggtgacccgtggccccgtacccacgagtttcggtcctctgaggcatctctgcaggcctctgcctgtaagaagaaaaagagcaaagagaagaagagaaaaagagaagaagatgaagaaacccagtttgatatgttggaatctggtgaacagtaacaaactttgatgaaatttcaggaaccatagccattgaaatggatgagggaacctatatacatgcactcgacaatggtctttttaccctgggagctccacacaaagaaggggaaaatggctttgttggcctcaaatggctgctttattagatgcaatgaagcaggggacatagaagcaaaaagtaaaacagcaggagaagaagaaatgatcaaggtaacgatgacattttatacagatgactgcattcacacatgcaatatgactgtatctctttaaaatgttaagtcatcatttactgtcactttaaagatttacttaatagctttttataatgtggtgtttcaaatagactcatttttaattacaaatctcatagttgatggcttgtttctacaatgtggtagagaaatcagtgcatctaggagctaccgtgccactatctccatggattagtatctttttctggtagttccacatactctttttaaactttcattttcttattttcttgtttgtattttaaaatctaatttttaaaataaataacatgtacatgtggtccaacatttttaaataaaagcatatgaagatgaagacatatgcctgccatgcatcttacctgtgtcccaggtcctgttcctctttccctttgttttgtttttttatagcctcctaaaatttctttataaacatatgagtatatttataattttcaactgttttacactaaaggcagcctcctctatcgtcttcttgactttgatttttttttccttaaaattgtatcttggagagttttctactattagtt

SEQ ID NO: 7607 - DNA, 1557 bp, Homo Sapiens
  XM_944822
ctttcactgctctttaagctcccccagcagagtggagaggtctgttttcccttgtttggattcctagaggcagcacaggccaaacacaaggtcatcactaaggaagtgtgcacaggatgaacgcggtgggtgctgtttaagggaagggtaaagcctttaaagggtaaagggctgagagaaggagcagagagtgtgtttggggtggaggcacccaggaggagtccgtgcaggctgcggtgctggacggatcctcctccagctcctgcttagaggtctccagaaccggctggaggcagggagggggtcccaaaagccttgggatcagaaggggttttcccgcctggtcccccagaccccccgttcgcctcaggaagacggaggatgagcctctgggctgcgcgtggtcggggttatggttgggatcagttaaggttccagtgccagcaccccgcccagggagccccggatggtggcgtctctgttagtgtcttccccggaggccgcccctgtgaccggatccttcgtgtccccacagcacgtttcttgaagcaggataagtttgagtgtcatttcttcaacgggacggagcgggtgcggtatctgcacagaggcatctataaccaagaggagaacgtgcgcttcgacagcgacgtgggggagtaccgggcggtgacggagctggggcggcctgtcgccgagtcctggaacagccagaaggacttcctggagcggaggcgggccgaggtggacaccgtgtgcagacacaactacggggttggtgagagcttcacagtgcagaggcgagtccatcctgaggtgactgtgtatcctgccaagactcagcccctgcagcaccacaacctcctggtctgctctgtgagtggtttctatccaggcagcattgaagtcaggtggttccggaacggccaggaagagaaggctggggtggtgtccacaggcctgatccagaatggagactggaccttccagaccctggtgatgctggaaacagttcctcggagtggagaagtttacacctgccaagtggagcacccaagtgtgatgagccctctcacagtggaatggagagcacggtctgaatctgcacagagcaagatgctgagtggagtcgggggctttgtgctgggcctgctcttccttggggccgggttgttcatctacttcaggaatcagaaaggacactctggacttcagccaacaggattcctgagctgaagtgaagatgaccacattcaaggaaaaaccttccgccccagctttgcaggatgaaacacttccccgcttggctctcattcttccacaagagagacctttctccggacctggttgctactggttcagcaactctgcagaaaatgtcctcccctgtggctgcctcagctcatgcctttggcctgaagtcccagcattgatggcagcccctcatcttccaagttttgtgctcccctttacctaacgcttcctgcctcccatgcatctgtactcctcctgtgccacaaacacattacattattaaatgtttctcaaacatggagt

SEQ ID NO: 7608 - DNA, 1898 bp, Homo Sapiens
  XM_944889
tgcagcggggccagagcagcaatggcggcgggcggcggcggtagctgcgaccccctggcccctgctggggtcccttgcgccttctccccgcacagccaggcctacttcgctttggcctctaccgacggtcacttacgagtatgggagacggccaacaaccggctgcaccaggagtacgtgccttccgcgcacctcagtggtacctgcacctgtctggcctgggcgccagcgcggctgcaggccaaggaaagtccccagaggaaaaaaaggaaatcagaagctgtaggaatgagtaaccagactgacttattggctcttggcacagcagttggtagcattttattatacagcacagtaaaaggagagttacacagtaaattaataagtggtggacatgacaacagagtcaactgcatacagtggcatcaagacagtggctgtttatatagttgttcagatgataaacatattgtggaatggaacgtacagacatgcaaagtaaagtgcaaatggaaaggcgacaatagcagtgtcagttccctatgtatcagcccagatggaaagatgttgctttcagctggtcgaacaatcaaactatgggttttggagaccaaagaagtctacaggcatttcacaggacatgcaacgccagtttcgtcactgatgttcactaccatcagacctcctaatgagagccagccctttgatggaattacaggtctttatttcttatctggagcagtacatgaccggttacttaatgtctggcaggtccgatcagaaaacaaagaaaagagtgcagtgatgtcatttacagttaccgatgaacctgtctatattgacttaactttgtcagaaaacaaagaagagcctgtcaagttggctgttgtttgcagagatggtcaagtccatctttttgaacacatattaaatgggtactgcaaaaagcctttgacttcaaactgcacaattcagatagcaacacctgggaaaggcaagaagtcaacaccaaaacccatccctattctagctgctggtttttgctcagacaaaatgtcattgttgcttgtatatggcagttggtttcagcctactattgagcgagtggctttaaactccagagaacctcatatgtgtttagtaagagatatttcaaactgctgggcccccaaagtagaaacagctataacaaaggtgaggacaccagtgatgaattctgaagcaaaagttctggtgcctgggattcctggtcatcatgcagctatcaagcccgctcctccacaaaccgagcaagtagagagcaagaggaagtcagggggaaatgaggttagcattgaagaacgtctgggagcaatggatatagacacacacaaaaaaggaaaggaagacctccagacgaatagctttccagttcttcttacccagggcttagaaagtaacgattttgaaatgctaaatgtaagtatatagcaatttttaactaaattaacatggttaatatttcttagaaaatgattgacatagcacattcacagctgtgagccatcatgttacagagccatttggaatgtaatgttttatgagtttagtcaaacatgtatcacttggtggcattatacagacagtcaccaacctacaacgggattgcattgagttattttgaacctggaatgcattttctcatagaaatactgttctgaattattaggttattaggctttagttcataaaagcctttataaacatagtgtagctgaatgataatactcagcattctagatcacaatttatatttttttctgtaggaaaatgcgttcctgagtttttactctggattccagaaacttatttccccctggccgtgagagggggcagtgaggtggaaccttggcaatggg

SEQ ID NO: 7609 - DNA, 1028 bp, Homo Sapiens
  XM_944898
taaattcaaggaagtgcttgaatttcttacagactgccaaatggaacagacaagcaggttgtcttgtgttaaagaaaatgagatataagtcagttactcccggaggcaatgctgctgttcagctcttctgtttttgtggccagggtcttcatgaacactaataggggtaccaggccctcttcctcgttagaagaaatcaggataacaaaggcatattgggcacccctacaaaagggaaaacagttcctcctgaggatttcagagaagagctggacttcctggctgactctcacattctcttcttctgaactgcttcttctggtagctccctgtcactttggacaagctcgcactgccctccttggctgttctggaactgtgtgatggacttcatcctactaggacacagttgcttcttgaattccccagataaacacccacccgtgtgaatgacaagccataataaaaattaattgtcaaaattaatcaacaaggtcccaaacaagattgagagccaggggacagaagtgccaccggtaattatatagtcacaggcagacctatgaggatgttcatctttcctctaagacaacttgaagttacagacgtttcttagaacttaaaaagtttgatagccccttacccaaagaaatagaagcattggaaaatatgttaaagaaatttctatgaaattagaacaaaatgacttattttgcaagagaaaaaataagtaaaagcctaactctgagaagtccacatccatctaataggtgttccagaatcagaaaaagagatgaggtgaagacattatcaaaaaaaataataataataagacggagaaatcccactgaaggacatgaatctcctaaaagtacccagcaaaacgaacagttcaaagacccaaaccaaggcactttctcttgaaattttagaccatcaggaacaacaatagtaaaagcttccagagagagagaaagaaaaaagaaaccaggttacatacaaagaatcagaaatcagaataaccatgc

SEQ ID NO: 7610 - DNA, 642 bp, Homo Sapiens
  XM_944937
tgcctttcaccttctgccatgattgtaaggcttccccaggcccgtggaactgggaggagccggaagagagcagtgcttcacaataaaaggaagaattgcttgaacggaggcgtttcaggcatgagtcacaggccgggtgtggaagaggaaagtgtgaagcaagggacaggtaccagctgggatgttggcagcagccgctcccctgcaaggagaacctcccacttcctgtcccgcacacctgcctcattggaaagtgacgcacccactgtttggcctcggcagcctgatgtttctcatcacacaggaagacggtcatgctacaggaagacctcggactttgcatccagcagatggttgttctagagattgtcagaccgagaccacgccacacacccagaaggcacccaagtcacagagcctgatattgttcctggagcgccattgcatcatccttgaccacaagatctgcgtcattggatttgtctcaaaaacttgggactctggagataaaacctcattgcaaggctacctttgccactgtatcttagcagcttttgaagcaaagcatttcaatatttagacactgtgtttctaatgggtactgggatcaaaataataaaaactcagtctgcaaagggagaa

SEQ ID NO: 7611 - DNA, 1060 bp, Homo Sapiens
  XM_945192
atagcttctctcgccaggcatcctcgtggaagtgacatcgtctttaaaccctgcgtggcaatccctgacgcaccgccgtgatgcccagggaagacagggcgacctggaagtccaactacttccttaagatcatccaactattggatgattatccaaaatgtttcatcgtgggagcagacaatgtgggctccaagcagatgcagcagatccgcatgtcccttcgcgggaaggtcgtggtgctgatgggcaagaacaccatgatgcgcaaggccatccgagggcacctggaaaacaacccagctctggagaaactgctgcctcatatctgggggaatgtgggctttgtgttcaccaaggaggacctcactgagatcagggacataacactggtctcgggcccgagaagacctcctttttccaggctttaggtatcaccactaaaatctccaggggcaccattgaaatcctgagtgatgtgcagctgatcaagactggagacaaagtgggagccagcgaagccacgctgctgaacatgctcaacatctcccccttctcctttgggctggtcatccagcaggtgttcgacaatggcagcatctacaaccctgaagtgcttgataaaacagaggaaactctgcattctcgcttcctggagggtgtccgcaatgttgccagtgtctgtctgcagactggctacccaactgttgcatcagtaccccattctatcatcaacgggtacaaacgagtcctggccttgtctgtggagacggattacaccttcccacttgctgaaaatgtcaaggccttcttggctgatccatctgcctttgtggctgctgcccctgtggctgctgacaccacagctgctcctgctgctgctgcagccccagctaaggttgaagccaaggaagagtcggaggagtcggacgaggatatgggatttggtctctttgactaatcaccaaaaagcaaccaacttagccagctttatttgcaaaacaaggaaataaaggcttacttctttaaaaaaataaataaataaataaataaataaataata

SEQ ID NO: 7612 - DNA, 1810 bp, Homo Sapiens
  XM_945303
aagaaggcttataaagactccagcaaagctccagtctcttaattatgtcacctcagggtgatgcggtcgagttatgaaactttgggaaaagagagaacaaggaacgcgggcgatcagaggcccagtcgcgagacctgccccgctggggcctccagccggcaccgcgacgccccgggacctggcaccgcctcgctccacccctgcgaatccggggcgaatccgggcggagagttcctgccggccgcgcagcgcagagccccctccggcccgccctctctccctccctcccgctgagctccagctgtgccagaggcacccgagccctgagagtccgccgccaacgcgcaggtgctagcggccccttcgccctgcaggagagaatatcctttgaccctacgtggaagcctacaagaaggggaattctgggcaatgtggttcagcccagccacatcacatactattatttagtagtcatgaagagagagacatagacagtgaagagtaagtgaagaatttgagggtcatcagccattgtgaactcatcaaaatattcccactctggccactgcccaaaggggctcttatctgaggaatactgctgacttcgtgtacctagttttacagagccatctttctgaagcataaattagattacattattctacagcttaaatccctccatgaacttcccatcacccaagagtggatctgaaactccttagagtgtcattcaagacccttctgtatgtggctgccatgcatttttttcaactttatttccagccttgcaatgtacatacatccatctctgtcccacgccctctgcagggctttttggttccagaacgtgccatgtgcttttctcctttggagctctttgaataggatgcccttcctcccttgtctgcctgtagatagaaacatcctgtgcattggtgagttggccctgaccaccattttcttagcatgctgaattacttctgttcccctctgtgtttgcacagctttgtttgtgcacagtagacttttggctgggccatgtagactgcctcctccatgagtttgccagctttttgaggacaatgtctgttttattcatcctcgaattctcagtgcctagcagagtgcatagcacagggtagttatgcaatacatattggagtaaaggaatacaattcaaaaaaacagtctcattaacagatgcaaaccaactcctctcatgacgcagagaatctaagctcaaacaaattaccagagttggcagttgaagtactatatatagacagaacttaataaatgcttttctttgtcttaagcctttgatgacagtgatgtgtttttatgaacgtagataaccacaagcagatgtgtcaaagctcttttgtccaggaataaactgagtttcgtcatcatcttgacagtactttcctggatgagtgttcaggaaacatgaaaagtttttaaacaattcaacaaatgtgtaataaaagtttgttatcttgttttatttgttgttatattgtctcttggcttgagtttttatttgggaagctaatagagagacgggatattagaaaaccagaggcaaactgcttggtttattgaagcactaactgaatgaatgcaggtatacgagtaatccaggaatcccatgcattaaggaaaaatttatttctatcacctctgtattgttgttaccttgtgaacctggcttggttttttcagcagttggtaaactgataagcctgtttctcactctgtcattcatctcatcagtttaccagcccagaaatactcctttcagtcttta

SEQ ID NO: 7613 - DNA, 1022 bp, Homo Sapiens
  XM_945351
gcagagcctggggccagagggccagacagccacagagctcctggcgtgggcaaggctggccaaggatggcgacgcccaggggcctgggggccctgctcctgctcctcctgctcccgacctcaggtcaggaaaagcccaccgaagggccaagaaacacctgcctggggagcaacaacatgtacgacatcttcaacttgaatgacaaggctttgtgcttcaccaagtgcaggcagtcgggcagcgactcctgcaatgtggaaaacttgcagaggttccgaggcaggtgatgaaggacgaggacaagccccctgacagagtgcgacttcccaagagcctttttcgatccctgccaggcaacaggtctgtggtccgcttggccgtcaccattctggacattggtccagggactctcttcaaggtgaggactcagggaagctccaaggttaagtgctaggtcctctgggggctccatgccacagtttgctgtcactggagcctgccgagggatccaatggggacagagcaggcagtgagcctcttagtgtttctaatgcagcccgtggccatctcagacacctgtcactagagtctatggtcttcagactcacactggtcacacgctctcagatgtttgacccccacacatgagtgccctttggcttgtctatgtgtcctgtgggtgctcgtgtgctctgtgtgtcctcgtgcatgcacaaacatgcacatccttttctattcttgtgcacgcacaagcccatgtactcagctgtgatcatatccacacgagcaagtgtacccatgcccttgcacatgtgtataccaggtatgtgcacccagaggtgtgcatccactcctgtgcagacgtgtgtacccctgagggctagtgtgctccccccaccagcctcctttctaccgaatgcacactcacgctaagaccctcaggggcacgctatcctccccgctgacttccatttcttggctgatcttggccccatgccccctctagttaagagggcagagga

SEQ ID NO: 7614 - DNA, 1069 bp, Homo Sapiens
  XM_945440
acgtctacatgcatacttctcttacactgctgctactggaaaagctgaaccccgcgccaggaccccagccccctgcaaggacccgtgagcgtctgggaagctgtctctgggactgaagccccccacctccgccgggctggcggccactgcggtaccctacgccccgtcgggctggtcctgcacaatttgggaaaaagccgcagcgcttctgcaaggtctacgtggccatgagcatgcaacgcttggctccaaaaaagacacgaaaggagcaaagcgccaacgaccacccgatcggagggcccgaggggcgcctcttcaccagtcagctgcagcttaagttccgtgcattatctgaaaggaacagctggctggaggtatccagggctgtcactccaacctctgcagcagtgacctcaactcccagcacttcaaaacccagacagaaacgtccaacaaactcccagtccaggagcgctgcaaaaccaacgccagtctagtttggggtctctataatcctgctcctttggctgccagccatctccataaaaaaagaatttgaaaggcttccattctttcagagacctgtttcccgggactggctgcaagggagagatgcactgaccttctgccaggtatagaactattgaatggtacagtttgagatcttcgaaaccatcaggactgatcattttctggctactttctacataggaatcctagagttccttggagaggatatgaaggttattctcaggccatgcagatgggcaagaaaggatgtgcgtccatggttcctcttcaaatccaaccaaaacagccttgcttccgttggctttatataatactgcaactcttgataatctgatttaacacaaatttcctcattgagtttctcctcatgaagaaacggcctcagtgaggtaaatcggaatgcacaggagcacatagcaggttagtgcagaccagaaatcaaacccaggctttctgactgctcaatagaccacaatctaccatgctaccatggaaactttaaaacagatgaaagtaaaaacaaacaaacaacaactta

SEQ ID NO: 7615 - DNA, 997 bp, Homo Sapiens
  XM_945536
catcagcattctcagacagcacctccggttagggacagtatctgaccgtccgacatccctgcagcccccatgtgtcacacagactcagcctcaggtagatggtttccgtagatggtggctttctttggacccttgacatcaaccagttactatttgactcttctgcagaaccccatgttgacccctgctttgaggtggcagagttaacactactcttcgttataagctctcgtctggggcaactcagaagaacgggaccagatgtgcagaggtaatgaataccagggaatcaggaaaccactggatcagttctttgagccacagaacaacactcatcccagcagctgggaagctatctgcaaaagtccatctgcagaaagggcttcctggtcttgcgtgtggctgggccatttctctggatgcaggtttttcattatacagtcttctcaaagaaccacctgctctcaacaccttctcggtgactccatttcccctcctctgggctcctggaatgccacaatggccccaccttagccaggcagctgtgatgagaggtgttgacccaactgcctctctgctggctcactgaatcaggtggaaggggctggggacagcacagtcttgcattgtggttggggacctgggccatccagaggcaggactgtccaaaggcagggtactgctgggattccgccaggcactgggtgatgcatggcatagggagctgaagagggacaggctcttggccaggaaaaacagccccagagccacaggtgtgccatcgagtcttcctcctctcccatccttaatcactcctgtttggtgacagcacacagctaggcctggagcccagcaaagagcccctgggtcccagaggaagttgttctgggggctggagacaatcacaaatgccaggtttgtgagccccagactctggttcatagcaagaggcagacttgtgaacaaaccaccagatcacaccgtaaaacacgctcaa

SEQ ID NO: 7616 - DNA, 3474 bp, Homo Sapiens
  XM_945614
gcagccgttgggagcccaggaggcggggcgcctgtgggagccgtggagggaactttcccagtccccgaggcggatccggtgttgcatccttggagcgagctgagagctcgaggtgagctgggctcgcggtcgcccctctcgcgcgccctctttaagaaccacggcgtccaacctccctggaaatggggggaacatggccgaggcgcgtggcgaggccgcctcgtggaggccccggagcggcatcctcagcgccccagcgatccggtgcccattaggtgcgccttgaagccgaggcaagctccttcggggtgctgggctgcgggcaaagaattcggccctgtgaagagttgggttcggcctgtctcaggccctgcccacatcccatcacagggccgtggacttgaagccggaacgtgaaatccctatagactgaatgcatttccttcctacctgttctctctccccttttatttttatttttatattattttatttttaatttttactttatttttttgtagagacggggatttagctatgttgcccaagctggtctggaactccggagctcaagcagtccgcccgccttggccccccaaagcgctggaattacaggcgtaatgcactgtgcctggcctttaaaaaaaaattgaggttattttggggacagtagagcgtccagacacatcctaatttgcatagctgcgcagttttaaaaaatgcaatgcatttttacctgttaggaacctgctaaggccatcaaacctattgatcggaagtcagtccatcagatttgctctgggccggtggtaccgagtctaagcactgcggtgaaggagttagtagaaaacagtctggatgctggtgccactaatattgatctaaagcttaaggactatggagtggatctcattgaagtttcaggcaatggatgtggggtagaagaagaaaacttcgaaggcttaatgatgtcaccatttctacctgccatgtatcggcgaaggttgggactcgactggtgtttgatcactatgggaaaatcatccagaaaaccccctacccccaccccagagggatgacagtcagtgtgaagcagttattttctacgctacctgtgcaccataaagaatttcaaaggaatattaagaagaaacgtgcctgcttccccttcgccttctgccgtgattgtcagtttcctgaggcctccccagccatgcttcctgtacagcctgcagaactgactcctagaagtaccccaccccacccctgctccttggaggacaacgtgatcactgtattcagctctgtcaagaatggtccaggttcttctagatgatctgcacaaatggttcctctcctccttcctgatgtctgccattagcactggaataaagttcctgctgaaaatccacatctcccctgggtccggtgttctggaagtgagagagacaatgtcacacctcaaggagacagctctctagacaggaaggttattcacgtcccatgtcaagtctagctagagttcagagcaattgagaagtgcgattttatctcctgcctttcattctataccctgcttctgaaccatcgtgttcaactgtgaaactcacgctttggtgaccctgactccaaaacttaatacacccaaggtcagccccagtgatctgcttcatagcgaggactttgggtgggtcttcccagggagtagggcaccctcagagaatgtggctttggacttcatcacagctagggtcttttgtgtcacttcagatctaaacttgtaactgtgctagatctgtttctaatgtgacaacatcacaaaccacgagtccagaagcctaatccataatcctacctcctcatgacgaagtctcatgctctgtgctcaacatggttagctgcacaagatgtaaaccaaagcttcactgaaccctcgacccaaatcggtaactcaagtgcatcaatcataatgaacctccccgaactcagtatttatgattatttttgaggcagggtctcactctgtcgccccggctggagtgcagtggcaggatcagggctccctgcagccccgacctcccaggctccagcgatcctcctgcctcagcctcttgagtagttgggagtagagatgcctcccacatcgcctggctaatttttgtatttttgtggagaggggatatctcgccacgttgccgaggcttgaagccagatcaagcaattgggttccttggatttccgaaatagaccccaatattctgcctttaccccggaggatgcagatgtaccttctctcaggccgatgacctcaggcctccacggtccctggagctctaggaaaggtgggcgcgatctcgcgcccacacccagtgctctgggtcataagcctggatctggaaaaacaaacgcgctttgagaagacggggactccccaggatacccctctctcccctcgtccagcctccagcccacccgattcctccccacatcctccacgtccccaggccccacccacctcctccaactcctccggggaaacccaagccctgcagcgcatggaacagaagaactggaaccgacgcttctggaacaaggctatctgagagcagttcttcctggccctcgggttcatgggacggcataactggaaccaatgcttagggcgcaagggtatgtgagagtgggtcttcccgtacaggaagtagaagatcttttgtttgggggcctcgtcgtcctcctccatgtcattggccagatagctgaggacagaaatcaggttgctgctcaggggcaccaccaggagagacctccggctgaggtcagcttcccagagaggaaggtaagggaccgtccctagctcaggactggcacccaccctgcagagagccacgccttcctcaggagggctctgctggacagagacctgatcaagggcatctcccactccttcaggatggagacaaaaacccaactggtgaccaagagtggtggcttaggcctggaatcccagcacactgggaggccgaagcaggaggatcacttgaggccaggagtttgagacaggcctgggcaacatagcaagacccttgtctctattaaaaatataaaaaatacgccagacgtggtggctcatgcctgtaatcccagcactttggaaggctgaagcaggtggattgcttgagaccaggagtttgagaccagcctggccaacacagagaaaccccatttatgctaaaaatacaaaaatcagcctggtgcggtggcacacccattagtcctagctactcaagaggctgaagcataagaattgtgtgaacccaggaggcggaggttgcagtgagccaagattgggcccctccattccagcctgagagacacagcaacactcttgtcttgataaataaataaataaataaataaataaataaataaataactgtccaggtgtggtggcacagccctgtagtcggagct

SEQ ID NO: 7617 - DNA, 2801 bp, Homo Sapiens
  XM_945620
tttgagaatcaataaatcttgagatcatttatggttttgcaattcaacctgaaaaatgaagtcaaagcttttatcaaaacaaagcatgtttagtgctctctgtctcactgtcttttagatgccagaccttagattttatgatgactcctcaaccgtttagatctcggttatctcagagggatcatcagctttttaagaaaattttgagagaaaagcaagtgaagaaaagagtagtcagtgcccaacatcacggatctctcactgaacacaccatgcctggtattctctcacagtgatgtcaccatttctacctgccatgtatcggcgaaggttgggactcgactggtgtttgatcactatgggaaaatcatccagaaaaccccctacccccaccccagagggatgacagtcagtgtgaagcagttattttctacgctacctgtgcaccataaagaatttcaaaggaatattaagaagaaacgtgcctgcttccccttcgccttctgccgtgattgtcagtttcctgaggcctccccagccatgcttcctgtacagcctgcagaactgactcctagaagtaccccaccccacccctgctccttggaggacaacgtgatcactgtattcagctctgtcaagaatggtccaggttcttctagatgatctgcacaaatggttcctctcctccttcctgatgtctgccattagcactggaataaagttcctgctgaaaatccacatctcccctgggtccggtgttctggaagtgagagagacaatgtcacacctcaaggagacagctctctagacaggaaggttattcacgtcccatgtcaagtctagctagagttcagagcaattgagaagtgcgattttatctcctgcctttcattctataccctgcttctgaaccatcgtgttcaactgtgaaactcacgctttggtgaccctgactccaaaacttaatacacccaaggtcagccccagtgatctgcttcatagcgaggactttgggtgggtcttcccagggagtagggcaccctcagagaatgtggctttggacttcatcacagctagggtcttttgtgtcacttcagatctaaacttgtaactgtgctagatctgtttctaatgtgacaacatcacaaaccacgagtccagaagcctaatccataatcctacctcctcatgacgaagtctcatgctctgtgctcaacatggttagctgcacaagatgtaaaccaaagcttcactgaaccctcgacccaaatcggtaactcaagtgcatcaatcataatgaacctccccgaactcagtatttatgattatttttgaggcagggtctcactctgtcgccccggctggagtgcagtggcaggatcagggctccctgcagccccgacctcccaggctccagcgatcctcctgcctcagcctcttgagtagttgggagtagagatgcctcccacatcgcctggctaatttttgtatttttgtggagaggggatatctcgccacgttgccgaggcttgaagccagatcaagcaattgggttccttggatttccgaaatagaccccaatattctgcctttaccccggaggatgcagatgtaccttctctcaggccgatgacctcaggcctccacggtccctggagctctaggaaaggtgggcgcgatctcgcgcccacacccagtgctctgggtcataagcctggatctggaaaaacaaacgcgctttgagaagacggggactccccaggatacccctctctcccctcgtccagcctccagcccacccgattcctccccacatcctccacgtccccaggccccacccacctcctccaactcctccggggaaacccaagccctgcagcgcatggaacagaagaactggaaccgacgcttctggaacaaggctatctgagagcagttcttcctggccctcgggttcatgggacggcataactggaaccaatgcttagggcgcaagggtatgtgagagtgggtcttcccgtacaggaagtagaagatcttttgtttgggggcctcgtcgtcctcctccatgtcattggccagatagctgaggacagaaatcaggttgctgctcaggggcaccaccaggagagacctccggctgaggtcagcttcccagagaggaaggtaagggaccgtccctagctcaggactggcacccaccctgcagagagccacgccttcctcaggagggctctgctggacagagacctgatcaagggcatctcccactccttcaggatggagacaaaaacccaactggtgaccaagagtggtggcttaggcctggaatcccagcacactgggaggccgaagcaggaggatcacttgaggccaggagtttgagacaggcctgggcaacatagcaagacccttgtctctattaaaaatataaaaaatacgccagacgtggtggctcatgcctgtaatcccagcactttggaaggctgaagcaggtggattgcttgagaccaggagtttgagaccagcctggccaacacagagaaaccccatttatgctaaaaatacaaaaatcagcctggtgcggtggcacacccattagtcctagctactcaagaggctgaagcataagaattgtgtgaacccaggaggcggaggttgcagtgagccaagattgggcccctccattccagcctgagagacacagcaacactcttgtcttgataaataaataaataaataaataaataaataaataaataactgtccaggtgtggtggcacagccctgtagtcggagct

SEQ ID NO: 7618 - DNA, 1895 bp, Homo Sapiens
  XM_945833
tgggagatttgaatatatttctcatgagtcagcagatcaagtagatagaaaataagtatataaaagaattcaatgacacaattagatacatgtaatagagattacatactcttcaaagcttgtaataagtcaactcacaaacactgattttaagtccttccacaaagaaaatctcaataaaatagggatataataagtcacttccctcctagggcgataatgtgtataaaagtgtttaaggtataaagccttagaaaacatttgttccttttaatgccctgatgtgttttatcctaggaacggcagcagtaggacacacagacaagattgggagattgaaagaactctgtgagcagtatggcatatggcttcatgtggaggggtaagccggcggtgaggctggtggctccattcgggcctgcacagagtccttatgaggactggacatccaggctctcactttggtgacatttatcacgaagggctctttgggtcacagatcacaaaataacccaaattggcttaagcccaaagagatcttactggctcacataactacaaagagcagtgttatgactgcctcaggcacaacatcaaccaggatccagtgtgttactcccacctctgctcccccagtcacaggcactgggcttggtttcctctacctgtggacagatcttcctgttacagtgcaaagtagctgcagaaactccatccttctttccagcttcgtggtcagctggaagtcctaacagaagtctcatattgaaccagccactgtggccagggagaagtaatcctctgatagttcaggttctttgccctcctctggagcagatagtggtgtctcctccccacaaagctcatgttctgctggaagaaatggaggtggcgccccggaaggctattgtagggccattaagagaagcagggggaacggacgtgggcagccagagtagcccatatccaccacatcatacagggaggtttctttttgatccctaagtaaagaatgataaaactggaaaataagatccatgaaagagaataatactcccattatattaaatgagcggggatagttcctgagacacacttttattaaagtgcattttcaggattttccttcatatgtataaagcacaccttctgttgctgttatgaaagctaataacattaaaaatatacttaagtgtcaacttgcaacagcacagcctttatttttttaagtacatggtgagtaagcaacattaaataattagttcttagactggtgttttttcttccagtgtgaatctggcaacattggctctgggttatgtctcctcatcagtgctggtatgttgttgatttactgaatattggtgtttttaagaatgaatttaaaatcactcaatccctcctggctcttcacagtttttatgaatggaggagggtgttaggtttgtgtattctgataatctaacaaagagttgttcttgttttggtaggctgcagccaaatgtgatagcatgacgatgactcctggcccgtggctgggtttgccagctgttcctgcggtgacactgtataaacacgaccctgccttgactttagttgctggtcttatatcaaataagcccacagacaaactccgtgccctgcctctgtggttatctttacaatacttgggacttgatgggtttgtggagaggatcaagcatgcctgtcaactgagtcaatggttgcaggaaagtttgaagaaagtgaattacatcaaaatcttggtatagtatataatttcatctgttttcaaaatataactttttttgaacttcagcaacttagaatgattttagaactttagaatgattttctccacatttcagtggaattgtggcagctccagtaaaaaa

SEQ ID NO: 7619 - DNA, 1897 bp, Homo Sapiens
  XM_945912
cagggcctgcagaacacagcaggcactaaatactggttgttgaatgaaccgatgagtctggccccgcgcttttggtcctgggatcacatatcccccctccagcttttaacacgcacctgggagctgcggctcggggtgtgcccccgagtccccgcccctcaggccacgcccccaggcccacggagagggcggggccccgcggacgcaacggtgggcacgatgcggcaacccgccgttcggctggtgcgcctgggtcgggtgccgtacgccgagctactggggctgcaggaccgctggctgcggcggctgcaggccgagccaggcattgaggccccgtcggggactgaggcgggcgcgctcctgctctgcgagcccgcggggcccgtgtatacggccgggctgcgcggcggcctgacgcccgaggaaactgcgcggctacgggccttgggcgccgaggtgcgcgtcacaggccgcggtggcctggccaccttccacggcccgggccagctgctttgccacccggtactcgacctgcggcgtctcggcctgcgcttgcgcatgcacgtagcgtcgctggaggcgtgcgccgtgcgcctgtgcgagctccagggcctgcaggacgcccgcgcgcggcccccgccctacactggcgtctggctagacgatcgcaagatctgcgcgatcggagtccgctgtggaaggcacatcacatcccacggcctggctctcaactgctctaccgacctcacgtggtttgagcacatcgtgccctgtggactggttgggtcaggcgtcacttccttgagtaaggagctccagaggcacgtcaccgtggaagaagtaatgccacctttccttgtggcctttaaggagatctacaagtgcacactgatctcagaggacagccccaactgaagagtactcataacagccaggatgctcctgccttgggaagcatgaagtctgacttgagtcacctactgaaacccagattttagacctggcctgtcattcactgatcatgaaactaaggacataccatgagctctgagccactattttcatatgtatcctgttttatttatatcttccccacctacctcagagatactagatgtgacaatactgtgaaaagcaacacatgctatataaaacattagcactgctattgacagcagtgtctcagagaaattcagatgtcatagattgttatttctcgattgttgatgtcatagattgtcatttctcgattgttgcttcctcaatactgtgtctaactgagcaattctgggctctagttcctttgattttgtgggaatcaaatctctgaatggcccaggtgaaggtgatgtgatgtagtgctttttcattctcaagagacctgggttctttctgcaataaagggaaaagggaagaaccttctaagaataaaatgggatcttaccttcctgggtttgattccccaagtttgataatttagcagtttttagttgggttaccctgagctaggccaaagactggaggaaggataagaataatttctcacactgtacaaatgccaaagatagaagtgagtttttcttatatgagacctctaaatttgtaaggctgcgtattatctgttgctgtgtaacaaatcatcaaaacttagtgacttaacagtaaacattaattatctcgtttgtgggtcaggaatttgggggaagcttagctgggtgtttctaggttagggtctcacacgaacttgcagttaagatgtcagctggaactgcacttattcaaaggcttggctgggctggaggatcagcgctccatatggtgcattcacttgcgtggttggttatggttgctgacaagaggcctcagttccttaccgtgtggacctccctatagggtt

SEQ ID NO: 7620 - DNA, 798 bp, Homo Sapiens
  XM_945979
ggggcggcgatgccgaggagacccaggagtctgaggacaactaggaggatgacatggaggaggacgacgatgactccgattatccggaggagctggaagatgacgacgaggacgccagttactccacggaaagcagcttcagcagcactccaggtcagttgctctcccctgaaggaagagtattctcggatttcacctcagaggaggaagaattcaggctgccagaactggactagcacttctgaagatcccaaggccagatgtcagccctgcctcaggaaccaactgaaaatttggctccattcctgaaggaattggattcagctggagagctgcccctggggccagagccgttcttggctgcacatcaggacttaaatgacaagcggactccagaagaaaggctcccagaggtggttccgcttctcaaccgggatcagaaccaggccctagttcagcttcctcgcctcaagtgggttcaaactacagatctagatcgggctgcaggtcatcaggcagatgaaatacttgttccactagacagtaaggtttcaagaccaaccaaatttgttgtttcgcccaagaacctgaagaaagatctagctgaacgttggagccttcctgagattgttgggattccacaccaattatccaaacctcagcgtcagaaacagactttgccagatgattatttgagtatggacacactgtatcccggcagcctacctccagaactccgggtgaacgcagatgagcctccagggcctcctgagcaagttggactttctcaattccatc

SEQ ID NO: 7621 - DNA, 3218 bp, Homo Sapiens
  XM_946124
gccacgctgcgggcccgggccatggccgccgccgatgccgaggcagttccggcgaggggggagcctcagcaggattgctgtgtgaaaaccgagctgctgggagaagagacacctatggctgccgatgaaggctcagcagagaaacaggcaggagaggcccacatggctgcggacggtgagaccaatgggtcttgtgaaaacagcgatgccagcagtcatgcaaatgctgcaaagcacactcaggacagcgcaagggtcaacccccaggatggcaccaacacactaactcggatagcggaaaatggggtttcagaaagagactcagaagcggcgaagcaaaaccacgtcactgccgacgactttgtgcagacttctgtcatcggcagcaacggatacatcttaaataagccggccctacaggcacagcccttgaggactaccagcactctggcctcttcgctgcctggccatgctgcaaaaacccttcctggaggggctggcaaaggcaggactccaagcgcttttccccagacgccagccgccccaccagccacccttggggaggggagtgctgacacagaggacaggaagctcccggcccctggcgccgacgtcaaggtccacagggcacgcaagaccatgccgaagtccgtcgtgggcctgcatgcagccagtaaagatcccagagaagttcgagaagctagagatcataaggaaccaaaagaggagatcaacaaaaacatttctgactttggacgacagcagcttttaccccccttcccatcccttcatcagtcgctacctcagaaccagtgctacatggccaccacaaaatcacagacagcttgcttgccttttgttttagcagctgcagtatctcggaagaaaaaacgaagaatgggaacctatagcctggttcctaagaaaaagaccaaagtattaaaacagaggacggtgattgagatgtttaagagcataactcattccactgtgggttccaagggggagaaggacctgggcgccagcagcctgcacgtgaatggggagagcctggagatggactcggatgaggacgactcagaggagctcgaggaggacgacggccatggtgcagagcaggcggccgcgttccccacagaggacagcaggacttccaaggagagcatgtcggaggctgatcgcgcccagaagatggacggggagtccgaggaggagcaggagtccgtggacaccggggaggaggaggaaggcggtgacgagtctgacctgagttcggaatccagcattaagaagaaatttctcaagaggaaaggaaagaccgacagtccctggatcaagccagccaggaaaaggaggcggagaagtagaaagaagcccagcggtgccctcggttctgagtcgtataagtcatctgcaggaagcgctgagcagacggcaccaggagacagcacagggtacatggaagtttctctggactccctggatctccgagtcaaaggaattctgtcttcacaagcagaagggttggccaacggtccagatgtgctggagacagacggcctccaggaagtgcctctctgcagctgccggatggaaacaccgaagagtcgagagatcaccacactggccaacaaccagtgcatggctacagagagcgtggaccatgaattgggccggtgcacaaacagcgtggtcaagtatgagctgatgcgcccctccaacaaggccccgctcctcgtgctgtgtgaagaccaccggggccgcatggtgaagcaccagtgctgtcctggctgtggctacttctgcacagcgggtaattttatggagtgtcagcccgagagcagcatctctcaccgtttccacaaagactgtgcctctcgagtcaataacgccagctattgtccccactgtggggaggagagctccaaggccaaagaggtgacgatagctaaagcagacaccacctcgaccgtgacaccagtccccgggcaggagaagggctcggccctggagggcagggccgacaccacaacgggcagtgctgccgggccaccactctcggaggacgacaagctgcagggtgcagcctcccacgtgcccgagggctttgatccaacgggacctgctgggcttgggaggccaactcccggcctttcccagggaccagggaaggaaaccttggagagcgctctcatcgccctcgactcggaaaaacccaagaagcttcgcttccacccaaagcagctgtacttctccgccaggcaaggggagcttcagaaggtgctcctcatgctggtggacggaattgaccccaacttcaaaatggagcaccagaataagcgctctccactgcacgccgcggcagaggctggacacgtggacatctgccacatgctggttcaggcgggcgctaatattgacacctgctcagaagaccagaggaccccgttgatggaagcagccgaaaacaaccatctggaagcagtgaagtacctcatcaaggctggggccctggtggatcccaaggacgcagagggctctacgtgtttgcacctggctgccaagaaaggccactacgaagtggtccagtacctgctttcaaatggacagatggacgtcaactgtcaggatgacggaggctggacacccatgatctgggccacagagtacaagcacgtggacctcgtgaagctgctgctgtccaagggctctgacatcaacatccgagacaacgtaggctgcatatattcaaagtacacacttgggtgaattttcacccagaagccattgttgctgtcggaagagtgagcccagtcctccctcatgccctgatgatcttcaggaggagaacatttgcctgcactgggcggcgttctccggctgcgtggacatagccgagatcctgctggctgccaagtgcgacctccacgccgtgaacatccacggagactcgccactgcacattgccgcccgggagaaccgctacgactgtgtcgtcctctttctttctcgggattcagatgtcaccttaaagaacaaggaaggagagacgcccctgcagtgtgcgagcctcaactctcaggtgtggagcgctctgcagatgagcaaggctctgcaggactcggcccccgacaggcccagccccgtggagaggatagtgagcagggacatcgctcgaggctacgagcgcatccccatcccctgtgtcaacgccgtgg

SEQ ID NO: 7622 - DNA, 2141 bp, Homo Sapiens
  XR_000543
tttccttatatgtctaaccctggcctggagcactggaggatgaggtccgctgactgcagcgtccatcctggtcctccccaggcactgtggcctccctcacagcatggctgccttgggtactcggacttcacgtggaaggccagggctccgagagcaaatgccccagcaagacagaagctcagccgcctttgatgacctagaagctaggcagcatccattgtactgccttctatgggttgtgagtgagtcccaaacctgccttgactcaaggaaacggaattaggctctacgtcttgactaggtagtggcgaagttctggaagcacatgagtaggagatactgtgacggtttcatctttggaaaataccatctagcacacctgaatctgctttcagggggtgtaaggggatttccatggcaaaatttgaagccacatgtggtcactgctttgtactgaggaaacaaagtgctctgggcatccagaaagggggtacgttttttcttactgggataaatctggctgcattttagctaatcctggaaaattgatcgacaaaagcaaaggaccaagaaagctgcttatatcagtgtctcctccaccctcagcctccagtagcatccctacgttttacaattttatttatgtcactttaaataaggacattgagagggaaaaggcctcatcgacataccaactacaggccaggtggaccttcggtgcacacacaccccagcgcccacagagatccaggcctcctgtgtatgaatgtgtgccatgaatttagacctatttctcgccttccgggctctctattcctcatcctccatccaagtggccatcttgtgcaggccctgaaagcagcagatctcacctgcattggaggatgagacgccacatgaagaagaaagaagacgccacagacagcagcgcagtaccaccttccagagatgtgagtgtgaccgtctttgaccttctagcccagctgctttccctgaatgcaatgcatgagcaggccaggcaaaactagagagggaagctgcccagctaacccacagaattatgagagataaaaaatcattgtcttaagccactaagtctgttatgcagcaatatatagcattcattcaacttttgtctcatgaatactctcatttcttttataagttcttttgtggttcaaattagctcaaatcagtttctgatgcttatgaccaaatgcccctatgtgatagattttgaggggttaagaagcttgctcggatcacacagcggtaagtagcagcacttcatctttaacccacctctggcccactccctttccataggtccttgttgcctccctccctaatcccttccagtctagtttcctcactcattttagcatcttgaagatgcctgaccttttgtaacaggcacttagaagaggcaataatcaagctgtgagctggaatactgggtttctcatccaataaccaggttggcaggttggtaaccatacaagggacttttcaaactggagaattagtgtgctgagcacaaagtggtgagtattttgagagttactgaaatataattgacataacaataaaaatacaatatttaagtgcatgtatttcaagtgtacgatttgacaagtttggttatattatatacacctacgaaaccatcaccacaattaagaaaatgagcatagctatcacacacaaaagtttccttgtgccccttggtaattcctccctctctcctgcccacatctctccttttcccaggcaatccctgatctgatttctgccgctatcaattcgtttgcatttcctagaattttaaataactgaaaacatacattaagaactctttttctctggccgagtatggtggctcacgcctgtaatcccagcactttgggtggccaaggcgggcagatcacctgaggtcaggagttcgagaccaccctggccaacgtggtgaaaccctgtctctactaaacatacaaaaattagccaggcatggtaatgggcatctgtaatcccagctactcgcgaggctgaggcaggagaattgcttgaacctgggagacagaggttgcagtgggctgagatcacgccactgcactccagcatggacaacagagcgagactcc

SEQ ID NO: 7623 - DNA, 2225 bp, Homo Sapiens
  XR_000645
tcctgcctgccctaggcgcccgtatccagccacggccgggagcccaggagtatcccgaggctgcacggggtaggggtggggggcggagggcgagtcttggtcttgagctgctggggcgcggattctctttcaaagccagaaccaggcctgtcccggacccgcgtcccggggaggctgcagcgcagagcagcggggctggggccggtggggggccgtttgggacgcgcggagaggtcctgagcgcggtggctctgcgtctcctagctctgatctccaggctacccctgtgattccgcgcagaggtacctctcggaggacgccggggtcccatgggcggcgccgcgcagggcgctaggaccccgcggggagcggaggcggcctcggcccgggagcctggaggacctggccggtcgatccgcccgggctggaaaactttctttataattacttctccaggtcggagcgcgcggcttgctaggcgcgcggggccggcgctgttacccggcgtggagtcgccgattttttttcctgcgggaccgcggggccccccagactagcggagctggacgccggggcgagcacggggaggggcgcaccgagggaggagacaaacttaactctggggccgggattccgaggcgggggccgcagccctcgaggcccgaagccaccgcttcctcccccgcctccccattcaggtgggcgccaacggcgggagcgagggtgtccaggccgccgggctgccaggtccgagcacgcacagggagaactctgcccagtggttcgccgggcgctgtagtccccgggatcctagggaccgaggcggccaggccctggggccccttgagtgcggcagctaatgctctcaccgcggcgggggaaggagcttgccaccgagacccccagccacgtgcgtccctcgcattctttaccggggccggggtggcggctacggaccgtcagctgggcccagatggagtcttgggagccctcaagtgtctcctgtccttgcccgcgccgcccctcgccactggcgctgaggcctgacgccgcctgcgtcccggctagaggcgcgcttgcctacaggtgagggaagacccccttcaccgacagtggccttaggcctggcaaggcgccacgacccgcccaggagccccggagggggcacagctaaaaacaccgctggagagccccgagcttccacgacgatcgcagtaaagaagcagtttcatctgggcaacgcacactgcgctttaatcaagttcctattcaacatagtcccagtgattaatagcccaactgcttcgttttcggtccagagctcataaacaagatatttttagcttgacgcttttggacgggagggagtaaaaaccagatacgttaaataaatatcccgatgtgagccggagagctgcttgctgagccaaatgcaggacccattcatatagcattcacctgtggagggagacctggacggaaatcaaaaagcaccaagagcgatttgcgtttttttctgcggtgctaaaactaatggcttttcctacctaggaacaaagaaacgccactgtacatgcacggttcccggcctgtggagttgtgggaggaaggcgatgtctggccttttttgcacagctgctgttgcctgcccagagatcgggaactctgccccgtaggactggaagaaacctcagtaatgggaataagactttgtccaatagggggctgatgaatgtgtgggggcgacaatggcaaggagtgggactcccggcccggggttcgccaaccccaggggccacaggtcctcctacaattgaaccagaattcacccacccgggcctgccctgtgcagggtgccgagagcccagggatgcatgagagggtggctcctgcctctgggaactgggacagtgggagagacggataagttgtcacacagaggctgctgggaggaaggaggagacagaaggagtaggggatgggacttcattcattcatcaaatgcacacgaggcacaaatgggaatcaagggtggatgtgctgtgatgaagagaagtcctgccctgaacaaggtggcgctgtggaggaggcagagatcagatttgtctgcggaggtgttatggactgaactgtgtccctgccccaaattcctatgttgaaggcctaacccccatgtgactgtatttggagataaggcttttaggaagtcattaaagtgagatgat

SEQ ID NO: 7624 - DNA, 580 bp, Homo Sapiens
  XR_000900
tttgcgggtggcggcgaacgcggagagcacgccatgaaggcctcgggcacgctacgagagtacaaggtagtgggtcgctgcctgcccacccccaaatgccacacgccgcccctctaccgcatgcgaatctttgcgcctaatcatgtcgtcgccaagtcccgcttctggtactttgtatctcagttaaagaagatgaagaaaacttcaggatctggctgcgctatgactcccggagcggcacccacaacatgtaccgggaataccgggacctgaccaccgcaggcgctgtcacccagtgctaccgagacatgggtgcccggcaccgcgcccgagcccactccattcagatcatgaaggtggaggagatcgcggccagcaagtgccgccggccggctgtcaagcagttccacgactccaagatcaagttcccgctgccccaccgggtcctgcgccgtcagcacaagccacgcttcaccaccaagaggcccaacaccttcttctaggtgcagggccctcgtccgggtgtgccccaaataaactcaggaacgccccggtggaaaaaaaaaaaaaaaaaaagtga

SEQ ID NO: 7625 - DNA, 4108 bp, Homo Sapiens
  XR_000901
aggggttcagatattctgaactgacctctctcttctgcagaggggtcatcgcatactcacacactgcatggctccccctgcctccatcacatttctccactgagcagggcttcccttgcccacagaggtgggtgagggtagcagcattggggttacggctgtggtttctttcacttattattagaataatagtcactggtgagacctgaggtagagatggagccgcctctgaaccaagcccacttggtttctttactgcactggttttcatgagaaagcaatttaatattaattctttaggatgttccagcttccctcagtgcattcccttgcagccagttttgctatctgcttagcgacctgcccattgtcattgaagtgtggcttctgggggagcgtcatatcttccattccatctcctgctttaggaaagacagtttttagtccaggggtttctcacctaatgactggatttcaaagccaagatgctgcagttgaatgtgtcaggaagtctctatacaaagagtgaaaagagactttagcatgtgaaccaaatccaaataaattcttcctgaaccatacactagagggggaagaagaaccaacccataatcagacacaccgatctgccttgcagtagaagcactttgaaggtaatttcacagtccaccagactagttttgcatagaacaaaccacagtaagtcggcaagcagagctttctatcttgttggaccactagaaactgtccagctctcttaagcctgcttctgcagcagcatccgtagaatttttgtactacacccaataccagactgggaaggcctatctttcagtgaccctgctaactgctaggatgaatgtatagtaacatgtacaggctacattgtaaacagcacaaaacagaagctgacatgtgtggttattctttttaagagaattataaatactgtaatatataattttattttattggcatgcctttttgtaaatacaaattattaacttattaaataggaaatggcttctggcttatgccattgtcatgtttatttttattttttatacttttctttcttcttagaacttagatgctgtcagccaatgtacatccccaaaccagacagacagacaaaaaattttttattgctaatggtcttttccaaaacaacaaaaaatatatatttttgttccaatgtgcaataaattctaaccacgtctatgcaagatttggctaaacttaataattgttcttaggtcttgagatgggcaacagagctgtaagatcccgccaagtacaccatgtgctcatgctagtgatgtcattaagctactagggcatagtgatgagatttttctgagatctaaccgtttccctccgctagctcctgaccccagcccagcaggctgtctcctcagtaacacatgggccttggtatctggcacccatcagccagcctcataggaaagaagccacctccgctgtatttgaagtttcactttttaaaaaaaaaatgtttcccacctttttatccttcacccactgtccttccacctgctcactcactcactctctcacccatcctgctccacacttctttggtagtaaatgacaccatcaccagcagtttacacccgcagttaacaggcatcgaactgaaagaatcagtgatgacgtttttgtgcatcttcgctgagtgggtaagtggcaatgctttgccaaatattaacgaagccaatcaaagagcagcgcagccacagtatcactgcacatatatatatagatatataaatataatataaatatttattttttgtagccaggtccttggtgcagtatttatactccacaatccaccttttaaaaaaaggacaaaaagcaaaaagatgtgtgatgctgttaataatttaaaatgcagagccaaagccactgagcagcagctgacatggttgctggtttgtgtgtgaaaaacattttccccctcttctttccttaacctccttgttgcttaggatgaggagactctgtaatttaaagcagaggacgagaggaggaagaaacttccatgttaacatggcctactctcactcctttctaaacgagccacttttggcgtcagaagttgactggagagagataaacaaactcccagtcaaagcccctaaagcgacagtgcccagagttcttttattttttgctgcaaccaacgtaaacctgtaaaagaccaacagtgaagattagtgtattagtgaatgcatggaggccaatgctgccctaatgagacgtgataaaaagtccatcactcctctaagccaaaaggaaacaaaataaaaatgaccctttttactgtacaagggaagcctgtcttggtgtgtttgttgcttgactatcccaattcttgagtcctgggaggggtctgggaattgggaccttagcacatttggggaaaggaggggaatagagggaagagaaatcaaaggggctctcgcaaagttctggctaagaaggagagattggaagaaaagcaaggtcctgaccccccccagatccccactcacccattgcatgtggcattccccactactggccggtgcttagaggcccataaaacctctcttcacctaatccacctggcagagccctcagagatgacgtcagccaacccagctggactggccttacttctgcctttttcacctgtatgttaaaaaacaaaaacaaaaaaaccctatccctgtgccccaaagctagggcatgtgcgatgcccaacagcctccactctgcaagctcatactgggccctgccctccatcgccccagacaggcccacagacgagggctggtctccttcacatttgtgtgggggtgggggcacgcttcctcttccttctctccctgtccccctttggggacatccctctctaggcctaggccatgtctcctggttcaggaacactctctcaggaggatctcgaagtgcccactctagtccgctccagtagctccactctggagcgagatggctggtaggtcagtccccatcctcctcccctcggcccccagcctccaggcctgctgtggaggtgagatcgccatgggtcatgactttgtgacttgagtcctgggcatcttctgtaatgatgcctctttcttttctcagatgttgcccacagtttagcaaaaagcttcgttcattttcaggtactccccaccccctaaagaattggctgcaacttgccagccagggggacatcaggagagaagaggaagtctgggttgggaggggcccaagttttgcaacagagtttccattgttcagctctgtgctttcttggattccctttccaagattaccaagatttcctccattaaaactcctgaggcaccccctgcccctgccccccactgctgtttgctgtacatagaggctaagtggggtggggtgggtgggtgtgcacatgtggtgtgtgtgtgtgtgtgtgaagaatgtatataggtaaaggggagtgtggtccagtggttccagaaaagggacagaactgtgttctgtccctagcttgaccgctggctcgctgtgtggccttgggcaagtcacttaacctctctgtgcctcagtttccccatctgtaaaatggggataataatactgacctacctcacaggggtgttgtgaggctttaactaaatgttttgtaaagcgttttgagatacagaggcaaaggcgctagggaagggcaaagtattattggacttaaggaagctgaaatggtaccataaatgctgctattctgagagccattttaaactgcactgctccaaccacccccgcttctcatcaccaggacagcaggtcgagaaaatgtctttcctttcacttgcttctggggtttgtgattattcaagacaattttttccccttgctgtatctccttccctcacctcctcgacttgttccctgttctgtttatgcggaaatggcagaaatgcttgagaaatgagaatgtgtaagtggattggaagtttatagtatgaaatttcaattttactttgtactgtacatctttttactttagaatttgcaataaagggttacgtcaatcttgttttca

SEQ ID NO: 7626 - DNA, 659 bp, Homo Sapiens
  XR_001013
gctgctcttccaggaagggctgcagggaccctgggaaccggaccagtccagctcacaagtatgaagagaatgtcgggagaggaagtggtggctatgagtcagcatgagtcatctcgttccaatgagaatgaaggctgaggtgtgcgccttttttttttttccttcttagtcgtgtgtacatcattgggaatggagggaaataaatgactggatggtcgctgctttttaagtttcaaattgacattccagacaagcggtgcctgagcccgtgcctgtcttcagatcttcacagcacagttcctgggaaggtggagccaccagcctctccctgaataactgggagatgaaacaggaagctctatgacacacttgatcgaatatgacagacactgaaaatcacgactcatccccctccagcacctctacctgttgcccgccgatcacagccggaatgcagctgaaagattccctggggcctggttccaactgcccactgtggactctgaggcctctgcatttgcgggtggtctgcctgtgatattttggtcatgggctggtctggtcggtttcccatttgtctggccagtctctgtgtgtcttaatcccttgtccttcattaaaagcaaaactaaagaaaacagaattacagccctatctgg

SEQ ID NO: 7627 - DNA, 2640 bp, Homo Sapiens
  XR_001027
aataggtgtcagtgaaggcagagacagaggttggggagggatacagcatgtgcagagggcctgtggcagaagagagaggttggtgtggtgggagcacaaggcaagagaagaccaaaaatgcaagataaggcagtaaagataatggggccaactaaagccttctaggcttcgtttgggatccaagtctctatttttaatatggtaggaaatgactgaaggccagaaacagagggaatcagaattgtgtttcaagagcgtcactatacggttaggatggaagacagattagaggaaatgcgagtggataaggcaagatgcatttggaagacagtcaagagtttaaccagaaagagaagacatgtcagtaattgccatcatgggaagcagtgagaagcaccagaattgagaaaccaagtactttaagagttagaggagggagacacaccctgtctagctgaggttcatggaagagttggtattcaactgggagggattttatcagtagaggagctgagattgagaatggggttgaggaagagataagtcaggagcaaaaatacggaagtgagggagcctgtgactgaagagcaacatgtagatcaatttgatgaaagcactaggtaggggccagcaaatactggtttgcttctgttttccagagaacctcgaggagacaaggtagaaaaccaatcccaaatgaacaggagtactactgagacctgtactgaataagacaagagaaactcagtgagctaaactagggtataagccacttgcaggagcagagcagggtcaggcattggtctgacttgctgtgaagactttaagctgtgaactcataggacttggattccacttgtcagggagtttgattggttcagaatctggggcaggatggaacctgcaggaaaaagctgactggccccgtgtgagacaggtgacactggaggaatgaagaataggcaccctcagaggtttaggctggaggcttggtgagaatatcaaccctgacccatagagctactgaaatgtatgatactacagtgagcgccaaggataccttcccagccaaacatgccaaggaatagtctggggatggctagtgaaccaagcttcacaggtagccccagttcttcatgagagacacacttgagttgctggcaataatattcttactgtccaaggttaagtggccctatgtctcacaaggccccattcagggcttatcaagcctcttgaatattccatcaagttagtctgaaactctagagtatttactttatatgttctgaacttaacagggcacattctgtctctaatatcttggttctgagtacccatcctcactaggacactagtgccatcttgctagctggtccatgagttacataatgatggagcatctcatatgtgtagttctgtaacagtgaccaagcagtggacattcctatccattcaaggctgaacatgtgatggagcaaggcatgtctgcacagggcctagcatgaaggggttgaacccttataacttggaaactaactgaatgggagaaatgagatggaataaggcactgacgttggtgcaatttctgattatattttgttgccatttaacttgtttttactgtatgccacaccctgtggtaactcgtttcatctgcacagtgacccttgaaatgcccacagtatagacgagaaaactgaactccttagaattgacgtatcttgcccaaggtcatacaatgagtgaatggggcaacctggacatggacttcagtcttcctgagctcagagctgaccaaagactctgtctaaacttccaagacccttttctcccattggttgatgcacatggtattgaaaaatgtcgagcattctctttctctgttgaaaagttctgcctcccattagttatgaagggaatcctacagaaaggggtgagtcccttaaattcttcaattgattatgggaggttagcaaaaaaagagagtttatgaacccatgaaaccttaggttctatctatcagctgtgtcttactgaaatcacctcttgaaccaggacccttcagacatagcaattcatgtcctcagtctctggacacaatggaatcctcattataaggccttccacacaaagataataatagtggtgcctctcccatgtgtgttcacatttttgagaaaaaatattcttgcagctatcaaagcacctgctaatcaaagatttcgtattccctgtaatttgtttttaatcttgtaaagccgactactttcaaataggactcagagtgtcaaaggctgaaattcatttccttgaacttcatttaactgggccacagaatcattctgagagaatcatttaaattaatatgtggcattacggtgttaaaaagaaaaaaattttgtcctaattcccaatttcagagtttctccagacctccaatctgggctctgaccccataattgtgtgcagctgagctgctgacaagtccacacatattctgaagtcacattttctggctctggggctccaaggactcacaaagaggaggaattttttttttttaatccctgcttgttccgtcaactagttcaccggttaaaccctgattgaatgtagaaattttagaaatgaaaaaaa

SEQ ID NO: 7628 - DNA, 3167 bp, Homo Sapiens
  XR_001031
gcaccagacgcccggtcaggatacttgtggtgaaactgtgagggcgcactgggtcctttggggttttctcccatgacagcctccaagacaaatggaagagagaaagtgacacccagcccttcttcagccgtgttttcccctccctgagccagggtccaggttcaaggctgggggactgccatgaggccacctatgactacagggacatcccaaagctgcagccatggaagcagccagggccaggccactagggtcaggcatcttggccaaggctggacaaaaggcactgtggcctggggatctgaatgggagtgggagtgggtgggccactcctatacggccacatgagggccacagagaaagtacgctgggtctgagactgagaggtgtcaggtgtctggggcatgtcaccttgcgccaagggatgcccagcctgaacctggctttacacctagggccccacttcacctcctccctgagatttacaagggggaaactgaggccctgtttactactggggaaaccgaggatcagggaagcgcagggctgcgcgtggcgtagggcgctctgtcccagcaaccaaaggatgtaagcccgtaggtggggagggcagcaccggatgccccactgggcccagggatgcacccaccacaggatgctgggggagccaccggccttggccagcccagctagccctgtggctttccagggcagctgagagcccaggtccccatggctaagcccctcagcagcccagtggtcctgagcccgccgaccccagacccagtcctagtccggccagaggaggccgtttacgagcccacacccgtaggtggcgccacagccggagaattggctttggttctgttggagccgcgccgcctttaaattagccccacgcatgcgcgacttttctagcccgagcccgccgtctgcgcctgcgatttcgcccatactccccggtgcccgcctcgtgacgtgccgcagtgttacgaagggacaccagggcgcaggcgcagctcgctcctcaggcctgcgagaggcccgccggcccagcagagggcgcccaccaatctgcacgcgggcccagcgagttatcttgatttcggccaagctttctgactgctccaaaaaacgaagaaaaagattcagggagagtaagaggatgaagagagctggtgaagcagctgaccaaatggcccgaggtggtatgcagccgcggtaaagcagggcccctccgtgaggcacagccgcccgggggttccctaggggaagcaggggctgcggcagacgcctctcgggcaggtcagggtatgcaccctcccgcaggggctcccaaggccgggcgtgcgtgaggccaggtccacgggcacaccactgtgaacactgattaaacgtggcctccacggcttccaacccccaggacaggaccaaccctctgcccccggctcaggccagagctcggcgagaccgtcgctgtttaacaagcatttgctatacgccaccttgcattatgacagcatgtgacccacacagccatcctaggaagcaggtaacagccctactccattttgcacggaaagacttgcctgaggtcacagagagcggcaggcctgggatttccatccagggatccgactgcagagcacgactctggagggtcttccttcttgctcctcccatccttccactgtccttggatcccccattttccccctgcacaatctcctaatccctatgttcaacttctcattttcaactggatctttcccaatggcattcaacacacttggtgtccccaaccttagagtagaacattcaagcagcacagcctcctgaaggccctcactcatccctttcccagcctgtttgcgaaatgctttgtcaggactcaaagttaagtctcacttccgtccaattcccatccccacaccaacacagttctcaagtcaccaatgggtaaaaggcttcagtgatccactcctacagccaaaaggcactgctcggtctcttcagcctcagatggttcactcctggaaacatttttccacttggcttcatgacaccacagtcctggtctttctcgtcccaggtaaggagagtcctggtctttgtcaacccaggtggccactattactttgtcgtcttaatattcagttctggatctcttcttattctatacccttcctaggcactgtcccctcccacagcctccttctcaccttttccataaccatgtctaggcccggcagccccacatttaccacttgcacaccagaccttataattccaggcctgaatatccacctgcccagggacactcccacttggatgtcccgagcacctccattttgccatgtctgaaacagaattcagcatcagttcctcacaactggtcttctacagacttccccagtaatccctcaacccacctgccaatatttaagctgtttgtaagccactcatgcaaacattcaataacccaactacgtgtcatagattggtctgaacacctagctgttaacataaagatgagcataaaagacaaaacccctgccctattgaagctagttcagtaatcacacacattccaaccgtggtatatgaggtggagaagaggtacaaaggaaaacgagagggtaccacaggacttgactgagtgtggcaggccacggatggctccctgacacagtaaccttaagtaacacatcctgaggctgagcaggaattcattaggtggagacagggagcgaactcctgcagagaggaaagaggggcagaaagcctggcactcactggcactgtcgattccccacatgacctttcaatcccttgcctcttgagaggaaccatctctgctttgctcatcactgtttccttgatgctgagtaaaacatgactcacaggaaggatgcaaaaactacaaaaatggaggcctcactccactactccattctgtgacataagccacgtcaactctttcaacactctggcaccactttcaacactctggtactagaataactcagtgttctaatatgtaaaatgtaaatgcttgccttgcaaacctgctgagaagcaaatccattatttaatgaataaaaagcacttgataaaagcactattcccaaaattaagaattaaattatgagagatcttcaacagac

SEQ ID NO: 7629 - DNA, 1061 bp, Homo Sapiens
  XR_001037
gccgcatggcgtgctgtggtgcaggtggccgaagggggcgttactgttgcgactggcatccgcatccggcagatgtagatggaaccaaagtccagaagttacgcgtcacccttgctctacagccaaacatgcaggactctagtaacccgcgaaatgatgggatagcgttgcaaatccttaaaagagtcttaacgaaatcctggctgacattgacttctccactgcaaccatcgagttcattgtctcctaaaccttgccatggaggcctgtggcacctgagccagccattatcatcaccagcacttccatgagctacaagctggacccactgcagtcctcctgacacactgaaatcagagcctgcacacagagcagcagatgcttcaatgtaaagctatgtgttccaagattactgaagcaggattctggccttcctgataagaacatgaccagatccagctggtttgcaacaagatgaacttcagtgctgagctttcaccaagtttttctcactacaatctcattgtaatactaaaatctccacccaagatggaggttatctgccattttctgtacatgtgttaccagaaaggggtcctgatccagaccccaaaagagggttcttggatctcacgcaacaaagagttcggggcgagtccatagagtaaagtgaaagcaagttcatcaagaaagcaaaggaataaagaatgcctactccataggcagagcagtggctttggctgctcagctgcttgtacttgttacttcttgagtatatgctaaacaagggattgattactccttgtttagcagttttctgggaaaggagtgggcaattcccagaactgagggttcctcccctttttagaccatatagggtgacttcctgatgttgccatggcatttgtaaactgtcatggcgctagtgggagtgtcttttagcatgctaatgcatgagcagtgaggatgacccgaggtcatttttgttaccatcttggttttggtgggttttggctggttttggccggcttctttaccacttctttttatcagcaagccct

SEQ ID NO: 7630 - DNA, 3689 bp, Homo Sapiens
  XR_001069
tcttaacatccaagacaaggccaccagtcaaaactatcaagttttagtagtattttcctgcttgattatataatagcctggcttagagatacaacctttaaataaggaatcttaagatgatgtgcagctgttctttgccttatttgtttgtttgttggttagtttgtagtttctaagaatctgctctgttcagctgtacagttccttcttctggagttaacctgtggcaaggattatgtttcacctgtcacaaaaatgagatctgtgccttcctctattataaagttagggcatgtgattcattcttcgaaatacttcaaaatgtactttggtatgtttttgtcttgaaaagaggttttctagctagaaattcggggcccagaaggtcaaggctccagagatccccttctcatcatccttcagttgtctgaggagacagaggatcacatgtgtcacagtgagtgctgattccccagaatctgcagtcttaagctcccctgctgacgcacacagccagttctctgcttcatattcatgtgacccactgtgaagtgacaggcagctgccaattctgtcatataagaagcagctctgcccatgcaactttgaaagttcctgcacttctccatagactgctccttcatggaaataaacacatcatcacactgtgggtgcctaagctaagtttgtttgcagtttgatgatgcccagctccttttcaactcagccttaattggcactttaagggccaggatgaggtttctctcaggccaagtcgagatttccagatttccttttgtccaaggctgaccagtttagaagttattcacatccttgttttagttctttccttcttgtcctggtacctcttcctttccaggattatttgcagagtctgtgatggcttacttggtgaccagacatggggtgagctactggtatagtctgattactttggcatctattctgaactggtcattggctgtacatgagtttttgtgctggtaaaggaatatactgggaagattggaaggcacagactgggaactaattctgagaagagaactgctgagttactgaaagaccttttggaccacccctaaatggagcatcttgatagatggcaaatccagtgtttcttaaacttgtccatgctgcccagagcccactgccttttatcagatgtgagacttcactgccacagtgtcatcccacagtttccttccctggacatttgataaagggaaaatcatttcttgtcctttaaggcagggactattattttttcacttttccacataccccacaacacctaacattgatttactcgtagtaggagtttcatactgttgaactctctaaaggccatttgttccagggcctagctgggcttgtgaaggacaacagagtcatttcctaaggaccccaaaagacagcatgaaggaaaaaataataataaactgctgttcacagtgccttgagtgtaccaccgtactttctgctatgccttgtccattccaatctggacagtctctgtgcccctcctttccactcaagtgttatccagcactcaagttctggctcaaggcccaacatctccgtggggacctcagccatcccagggcattgtgaccccttcctctaagtccccggcacactcgctgattggtaccctctcattcgacaaagcatatgccattgtggcttacttgtcatttctttaggtcttgccttcccaagtagatcatgagccactataagaactagctcccatagtcccagcccctgggcctggtacatggcaatgcttagtgattggtgattgaggataatggtggtaaaggatgtaccagacagtcatctcctgaagagatgccgaacaacctgtccttgttttatgtattttctctttctttcctgtccagttttattcctctcatagtaactgctaaaaaaatatcagttcctgtcactcttccaccccttttctccctctcccctgcattgtggtctgggccttggtccactagcaactccccttaggtgttgcttaatctgcctcatggccaaagccaatcccattcctgtcccccgctacccaagggactcccagtctgtatgcacaaggcgggatgtgaagtctggatgtgcaagaaacccagctgtaagaaacagcttccctcggcttggcatggtggctcatgcctatattcccagcactttgagaggtcaaagtgggagaatcacttgagcccaggagttcaggactagcctgggcaacatagcaagatcccacctctacaaaaaaagaaaaaattcagagtctcaaatgtcccttcatctccttactctcgacctgtctccctagttctctgccgccttttcctctcccctggatctgacactcaattgtctgcatgcacttttcaactgaaagagactccaatgccatccttctgatgaaatttttgctttggatactactgcagaaaaaatgctatcttgtattctggtccatggtggggaagaccctgtcgtagaacctggcaactcaagtggagggaggggccagaacattgttcttatgctatttacagtgagacaacaggattgatgcagaactttctttttttttttttttttttgagacagagtttcattcttgttgcccagggctggagtgcagtggcatgatctcagctcactgcaacctccaccccccaggttcaagcagttcttcctcagcctccggagtagctgggattacaggcgtgcgccaccacgccccactaatttttgtatttttggtagagacggggtttcaccagtgttggccaggctggtctcgaactcctgacctcaggtgatccacccacctcggcctcccaaagtgctgggattacaggcatgaaccaccgtgcccggccgtgatgcgcaactttctaataacatacttttgaaagtgcccagacatacatccctcctctggtaccacagtggccatcagttgccagagaacatgaaattatccagccctcagctctgcagcaggattctgaggagtaaagcaggcctgtaaagtactctaaagtacttcagagaggtaatgccacaaagcgaagaacacctcttggaggcagagcccctcagccctatccaggccagcagtgtccacttgaaatctgaaagcagcctccctcaccaaaccagcaagatggaaaacctccctgggttggcaagtggccctgggaagtacatgccccatctctgtcaggatagcagtggagaggtttcgtgccagtgccagctccacccacccagatggtactcaagactccaagcctgtcaatggggtggaaactttctggcattttctgtcagaagggtgagttagcactgaaccatctcatgtgtcttttcactgagtaacagcccatatccattccatgaaatgagtgactgctttgttgaatcagatagtaacaaacatttatttgtagtctggttgtgtcatatcatggttgaattgcaaacaggttggatagaagagtcagcaaaaatcaacaaaagcattctgtaaaaaacttttctagaattacaataaatggcattgtatattttatttataaattatgtgctgcacatcatttttatcaatgaaatttataataaatttctgtacatatata

SEQ ID NO: 7631 - DNA, 1730 bp, Homo Sapiens
  XR_001080
tgttaactattcgcttataaataatcttttttgcctctcaacctgtctcccaggtagtgtacctgtcaccattaataactctttagccgctccctagtgatttgacctatcagttgtcgttcacagaaaagtggtgctctggcctgctattgaagcttatgcaggttctttcagctcctcagtcaccccagcagccatatacttgtaggaagttgtgttggtgggcttcacaagcaggcagctgaacacttcgtacagtttgataaaggtggcattacattttgaacaatagatgataagactcccatttagaccgcaaaacagtgccacaggggtagacaggggtctgggggagataagatgggtggtgaagatgaccaacagcaaataaactttcctgtctctttgatgctaattatctctttgcacctaattatcatggcatcatcatcatcctctgatgtttgcaaactaagagttgatgtgtttgatcaggttagtgaatctgtcaggtatggcattctgcctgtttctgaagcttaagaatgagaagccagtagctatcatgcggaagatgtgaactgccccccagtccttgtcctttagcagtgtgtcattcctctgtttggacatgtgctctcttgcttcctctcttcctctctctgttcctgaagtgtgctgcttccaacacttccccaaattaattcctacctgcatttaggtctcaacctagccatcactttttcaggaaactgctactgctctctctatttggcattgactgtaccaactaaaatgcccatatggcagttttcgtttatttcttattatgctctacaataactgcttgtttacttgtctttttctcctactggattgtaagttttttcatggatggtacatagtgttgtttgctatatccacgttctgggagtgtcatagaatctcaataaatttatgtgaagagaatgagaatttattttttatgaactcactttccattgacatatcatggtcatatcaatggggagttcaggcaataaattatggcatatattgtctactgtatactgtgctggcaccaggggttcagataggaaaacatttcgattgctttttacccttttagtgagtgactaatggacatttctttgtctgaggatatatcttggcagtacaggatttcttcagacgtggctcaggaaatggccgagagtaaggtgaatcacaaggcaaaaaaaaaaaaaaaaaaaaaaaaaagcattaaactatgttgggaagtaatcccagcattggtggacacacattatgtttttaaaaataaatcctccaaggaggtaaatcagttaggtattatgttggtttggttttcatttggaaaggaatttacctcgtaaacgatctttgttatccttatctcactgggtgtaaggagttagcaaatgatcacatttttaatacccagaaaaataccatattctttgccacacagatgtacgcatatgccacatatacatacatatatgtgtatgtatgtgttcctttatatataattaaatacaacagtgatctgaaaagaccaaaaagagtaagaaacttagcattttagggagaacaaaaacaaaaacccaggatgaagcattttagtttacctttataaagatcaggacaggttatgtctgtaggaacttatatacagtatctagtagatagaatgataaaataagaaa

SEQ ID NO: 7632 - DNA, 1965 bp, Homo Sapiens
  XR_001081
gtttgcacggagtgcaatcactgcgtccttacgggggttgcaaggcgtccgaagtatgagtccactaacaaaagtccagaaactcgccagttaatagtattgtgtctcttcaaaatatcggagaataatttctttctcgctgatcgcctaacttctactgacgaagcttggaagttgcagaagatggagttcgctcttgttgcccaggctggaatgcaatggcatgaccttggctcactgcaacctctgcctccccagttcaagtggttctcctgcctcagcctcccgagtagctgagattacaggtactggctcctgtatcacccagctctggagttgaaagagctcttcattcctgagtctcctgtaccactgagaataggctggagtgcagtggcgcaatctcggctctctgcaaccttcacctcccgtgttcaagtgattctcctgcctcagcctcctgaatacctgagattacaagcatgcaccaccacgcccgtctaattttgtattttcactagagacggggtttctccatgttggtcaggctggtctcgaactcccgacctcaggtgatccgcccgcctcagcctcccaaagtgctgggattacaggcatgagccaccgcgtccagcaagaataggtgattttcaaacttggaaacattcagaagttatcgcctcagtttcagattgagtagtctcaaagagattacagacatctaccacaaattctctacttggtgtggtgcaaaatcagtatgatgtaaactttgtctctcagtttcttcaaaggaaagaagcaactggaacacacatataacactaacccttccagctgcattatgagggaccagtacctgtctcaaggcaaaattatgacttagttcatcctcacctctggaggccagtaaaagtgggttatagaagaacaaagaggcatctagatctttcactgggttatttggagagaaacatctcctaccgaaggccagtttaacaagactggtagaggaggttatcttatctaattcacagaaatcaacacattgagtcaagaaaaatgaaacacagaaacactctaaataaaagaagataagtcttcagaaaccaaccctaatgaaatgaagatatgtgattaacctgacaggaaattaaaaagagcaaccataaagagtctcatgggagcaatgcatgaacaaactgagaattttcataaagaaataaaagataacaaaaagtataaagttgaagaatacaataactggactcaaaaatttaatgtgtccaacagaagaatcgatgaagcagaagaaagggctatcaaacttgtagataggccattggaaatcatgtaatgtgaggagaaaaaagaaaaaagattgaagatagtttaagagacttttgagacatcctcaaaggggaataatttatacattaccagatggagaagatagagggaaaaggacagaaaacatatttgaagaaataatgtcagaaaacctcataattctggcaaggaaatagaaatttagatctaagaatctcgaacatcaggtatgatgaatccaaggagactcacaccaaaccatattgtaattaaataaaggttaaagacaatcttcagagcagcaagggaatagtctcttcttacatacaaaatgatccacggaagactgtcagcagacttcaccagaaaactttcacgccagaaggcagtcgtgatatatacaaaaagctgaaaggaaaacactgccatccaggaatactatctccaactatcctgtgtttcaaaaattaaggagaaatataaagttctcaaacaaaagatgtgggagtttaccaccactagacctgcacgggaagaattgctaaagggagtccttcaagctgtagtaaaagagtgctaattagaaacatgaaaacgtgagtataaaactcgctgataaaagtaagtacatagttg

SEQ ID NO: 7633 - DNA, 2931 bp, Homo Sapiens
  XR_001271
ttgcgcgaggtgacgccggggcagggccggaaggagtgcagcggctgccacggagctcgtagctgcagctttggaggagtaagcggcgtggtagcgaaggtcgccgaacccgcctggctagccggcgagttgagtggcgactcttttgaaacagatggtcaccatgtttagatattagcagtcccgtatgtgcatgtctgcatttgaaaatggaagagggaaacaacaatgaagaggtaattcacttgaacaactttcactgccatcggggacaagactttgtaattttcttctggaaaacccagattatccaaagagagaagacagaatcattataaatcccagtagcagtctgctggccagccaagatgagacaaagttgcctaaaataagacttttttgactattctaaattgactcctcttgaccagcactgcttcatccaagctgctgacctcctcatggccgacttcaaagtgctcagtagtcaggacatcatgtgggccctgcacgagctcaaaggacactatgcaatcacccgaaaggactttgagagtcatcagcatatggaaaatctcaccagccaggatgaggtacccagagataccaggccttttctgatgccattaaaaaatggcaggagctatcaccagaaaccagtggaaaaaggaaaaagagaaaagaaatgaaccagtattcttaaattgatttcaagtttgaacaaggtactgggctgctgggggatcccaagtgagcagagtctgttttctaccctcgaggagctcagagaaaaggaaatagataattactgtgtgatgagactccagacagaggggttggcatctgcacatccttcctgggcatctcgtgggcactgctcgattaccaccaggccttgcacacctgcctcccctccaagcccctcctgggcctgggctcctctgtgatctacgtcctgtggaacctgctgctactgtggccccgagtcctagctgtggccctgttctcagccctcttccccagtatgtagccctgcatttcctgggcctgtggctggtactgctgctctgggtttggcttcaaggcacagacttcatgctggaccccagttccgagtatcctctatttctcctggttcaacgtggctgagggccacacccgaggccgggccaccatccacttggctttcctcctgagtgacagcattctcctggtggccacctgggtgacttacagctcctggctgcccagcaggattccactgcagctgtggctgcctgtaggaggcggatgcttctttctgggcctggctctgtggcttgtgtgctactgctggctgcaccctagctgatgctgggagcccaaccctgaccaggtggacaggacccagagtctactttcctcagaggggtatcagctgcctcagacccagttagcacagaacttttttcccaagggtaaggctgaggctgcttcgccagtgaagggagaggtgaacggcgtcctttgaagcaggatcagacccagccagcagagatggagagtgactgctggcagaaggcaggcgaggataagctaacgatgctgctgtggcctccatgcactcagcaagagtgggatgcctctgctgggccgtgcaccagggatggtgctgagtggggcagaggcctgccttcaaggagttcacagtgaacaagatgagaagggctgggccctgcagggtcaagagccccaattacgtacaagacactttgggaggaaagaagactaccttttcttttccccctgccattggtatagctggtgccccaaaactttcacctccctccctggccacctctaaaatgattggtataggggcttccccaccccttagctcccctatcctgggctagaaggccacagggactgtcctctagaattcttcctcccctcccccacaccattcattcaattcgtgaaacaaatcttcaccgagagcagtttatgtgctaggaacatcattctatccttgcaacctggaacaagaccagctaccaccttagcttcatcccctacttgcaccaaccagtcccgggttagatctcaaatgccggaagtcagggatgcccaactctgggcagccccagtcagaacctctgggatctcagtgaagctggcctggcctctgctcttgctctcaaggggctgcttttcaaccaagagccttgtgagcctggtctgagccttgcacagccactgagtattttttattccttagccagtgtacctcctacctcagagtctatgtgagaggaagagaatgtgtgtccctgtgggtctctgcaagtgacagatgtgttgtttttaacagtattattaggttatgattaaagcctcatgaaatcctctaacctagtctgtgtcatcaaacaaaatctacggagttcagaacctgaactggaagaggtcagggacataaaatctacctctcaaaatcagtcaaggtccacggaacagagaggactggcttaggtggggcttctcaaccttgtaaagtttcaggagctggtgagccagcctggggttgacagctcagctggaggtcggaatccagatttgggctgacttagtgcatcctcttcaccacgagctctgctgctgggcccagcaggagtggccacagacacatttagggccaggaagtgaatataggagcctggtgaagaaaggtctttttgctgggagctctgagaggttaagtgatgaggtgccttaggagatgcagatgtggtgggtgatggtgctggggaagtggaaccttttgctgttctaggaggtctgtggtttggacaaacaagggacagaaaagtcacttgagatagagaagaaaaggttccagtcaccgctgcgatggcatccaggatagtctcagctctgttactattctgg

SEQ ID NO: 7634 - DNA, 1022 bp, Homo Sapiens
  XR_001382
ccgcgccagctgagccaggtggagccctactttcctctcctgctttctgcctgtgactagcgccgtcccctaccgcccgtcgaccccacttccatgtctggcggacacagctccccggaacctccacgcccatggccactagacagagggagtcttccttcacctcctgcttttccacctggaattgcgacgcgggcgacgagggcgtgggctgcacctgcgaagatgcttccttgtgcaagaagcgcctgtcgggcgcgggattcggggctggcatctgggacgcgggctgaggtgggaggcgggcctgcatctgaagaatacgctcggaggctggcaggttgctgcccccgcctcgcacgaccctcgcttcccacctgtgaaatgcacagaacagggcttcatttatttaacgaatcgtttctgagctcctgctgtgagccaggcttggagcaagcctgggtactgtggatgggagcaggcccctgaaccaggcgggcggggtcttggcgttctcggagctaaacgctgctagaaagacaaacatgatgcacctaactactgtctccgtagattatgaggatgagaggtggaggttctctctcttttaggtatgatccccgttgtgcacctgaaactcaggcgatgactttcagtgaaggaaatgacctgtctagggccacataatacctgtttgaaaagccagtaccacactaagtctccactattaagggtgtgatggtgagggtggggtcgtagggagcacaggtatgtgtcagaaagagaaaacatgaggcttgagtgtcctccatttattcactcattcattctacaaaaatggagagcttactttgtgccagggccttatttgggctggttggtggggattcagtaatgggaatacaccaagaacaagacagacgtgctgccagacatactggaactcacggtttagttgggaaagactgacaggaaataattatccatgagatacataattaaaatttggtgttgtgcactga

SEQ ID NO: 7635 - DNA, 924 bp, Homo Sapiens
  XR_001385
cgcgcacaatcctcgctcggctgcggctctcgggtgtcccaggcccggccggtaagcagagcatggcgggtgcgggcccgaagcggcgggcgctagcggccccggtggccgaggagaaggaagaggcgcgggagaagatgctggcctccaagcgcgcggacggcgcggcgccggcaggcgagggcgagggcgtgaccctgcagcggaacatcacgctactcaacggcgtggccatcatcgtgggcgccatcatcggctcgggcatcttcgtgacgcccacgggcgtgcttaaggaggcaggctcgccggggctggcgctggtgatgtgggccgcgtgcggcgtcttctccatcgtgggcgcgctctgctacgcggagctgggcaccaccatctccaaatcgggcggcgactacgcctacatgctggacgtctacggctcgctgcccgccttcctcaagctctggatcgagctgctcgtcatccggccttcatcgcagtacatcgtggccctggtcttcgccacctacctgctcaagccgctcttccccagctgcccggtgcccgaggaggcagccaagctcatggcctgccactgcgtgcgcaattctgggtaaacgatcttcatttgcctataaagctgcacagctcacaggccttggatcgtttctgcccagccccagcattggccctttggacagactctgaaactgtgcgcagaacgcaccctgtcattacaaatgactcctggaggcagtccccgggggcctggcaggagcacctctgtttctgttgggtctgaaaatgacagaccaattgcttgaacccaggaggcggagggtgcagtgagccgagatcgagacattgccctccagcctgggcaacaagagcagaactccgtctcaaaaaaaaaaaaaaaaaaaaaaa

SEQ ID NO: 7636 - DNA, 4102 bp, Homo Sapiens
  XR_001421
atgaacgtgttgatcacctttgtgtgtcagaaaattaccattatctgccgctcccagtttcagtctgcgccaacgaatgtggggacagttcgtctggcgcccgcggtcgcatccccatcgggcagttccgtacccctcctccgggcttccaagccgctcgccccggctgcgggagaccccggcgaatcacatccgagaggggggcgcgtggggcggagccttcctcccactgtcctcccgccaccagccgcccctgtcgccgagcccgcagtcgccagcgcgccccgagcccctccaggccagaggctcccgcaggcgatggcggacaagagggcggggaccccagaagccgcggcgcgcccgccgcccggccttgcccgggagggggacgcgcgcacggtccccgcggcccgggcccgagaagctggggggcgcgggtccctccaccccgcagcgggccccgggaccgccttcccttcccctgggcgcggggaagcggcctccacggcgactactccgagcctggaaaacggccgggtccgggacgaagccccagaaacctgtggtgcagaggggctagggactcgggcaggagccagcgagaaggccgaggacgcgaacaaggaggagggcgccatcttcaagaaggagccagcggaggaggtggagaagcagcaggagggggaggagaagcaggaggtggcagcggaggcccaggagggcccgcggctcctgaaccttggtgccctaattgtggacccactggaggccatccagtgggaggcggaggccgtgagcgcccaggccgacagggcctacctcccgctcgagcgcaggtttgggcggatgcacaggttgtacctcgcccgtaggagcttcatcatccagaatattccgggcttctgggtcaccgccttcctgaaccacccgcagctctcagccatgatcagccctcgagatgaagacatgctctgctacctgatgaatttggaggtgagggagctcaggcactctaggacaggttgcaaattcaagttccgcttttggagcaacccctacttccagaacaaggtgatagtgaaggagtatgaatgcagagcctcaggccgagtggtgtctattgcgactcgcatccgatggcactggggccaggaacccccggccctcgtacacaggaaccgggacactgtccgaagcttcttcagctggttttcacagcacagcctcccagaggccgacagggttgcccagattattaaagatgacctgtggcccaaccccctgcagtactacctgctgggggataggccctgcagagccaggggaggcctcgcaaggtggcccacggagaccccttctaggccctacgggttccagtctggctaagtgctgccttgggatgtgcggcctacataagcttcctcatgcctcctacgggtggcggatctgggctcaggcccatggtgggcgctctgttgtctgctgtctgctgtctgctgtctgctgtctgttctgtgcactcccgctctgcgtggttcggtggactcagctctcaaattgtggccctcgtggccagtctctactgtttccatatggcctcttgctgttctgtgttaacatcacgtggctgtcacatgccgctgcgtctacactaagcacccagtgctgtggatgtgcactgccataatctttacggcatggacctgtgaccgtggccatcccagccatttttgacaagggtacccacaagtcactacttggaggacagtgcctctttgaggcctatgcttcaagactccagcctgccggccttcgcatgcttgctggtcgtgctcacagtagctctctacaccctggctgtggcaaactgagtctcatcacccaagatgaagtggcttcatttggtgccgggtgccacccaggcttggacattccatggcctcaagaccacaggctaccaccaagtggactcttgggtatctggcaggatgagcacacagctggctgctgggcatgggtgaggtcaagggcatgaagcagtggacagcacattctttgtgatcatactgctcctcctgccccacggtggcctgacatcacagcctgctgctagcttatgagggtctgtgccgtgccccaccaatgcctagccatctcctttcccatgagttttgcccagaccaccatcagccctgttgcccgcccccaggtctacaggaacctccatagccgcttgtggacccaggtgggccacctgccaatgcacaggagagcccctaatccccaggaactctgccaaactggcctatctgggcatgtgagtgaggcaggggcaaggatgggatcccctcctgagccccagttactggaccccacagaatccaggtgctctgccagcccccctgcctctacctgttaggctgccaagctgtgggtgctggggagggggtcttcctggtcctggggcctgtctatccatacccagatctcacaccatttttttctttaaatgatggcttagaaacaaaaaataacaactgaagaaaaagattttttcttaaactcaacaagaaagactttcgtgttcagtttgcctctcttcgtctccagagagggagggtttgccctgtagactgccagcattctctcttcccctataccttaccctctttagcaaggcctagaatcttccaaaggggacagtccaaggctgctgaacagagagaccaggaagtccccagagcggggatagttaatattccattttatgctgtgttcttttagactaaccccaactctttcttacccttccaccaagtccgaacccctctaggtataagagctgagctgcccaccccctcctccccctgcttgcagagctgtctgtctccatttcattttaggggaaggggtggtagtggccatacccaggccccttcccatggaaggccttatcttctgttccctaggacctggggaggccttatcacaaaataatgtggagggtgcttttggcagggaagtacaaaaggaaccagagccagctgaaaaggcaggatggctgagagatggtagaaggaggagagcccttgattttggttaatacatagagacagggtctcactatgttgcccaggctggtcttgaactcctgggctcaagcgatctgcccaccttggcctcccaaagtgctaaaattataggtgtgagccactgtgcccatctgattttttttttttcttcaagacagggtctcactctgttgcccaggctggagtgcagtgatgcatcatagcctcaaactcctgggctcaagtaattctcccatctcagcctcccaagtagctgggactacaggtgtatgccaccatgcccagctttttaaaaaacatttttgtagagacgggggtctcgctatgttgcccaggatggtcttaactcctgggctcaagggatcctcccaccttggcctcccaaagtgctgggattacaagtgtgagccaccgcgcccagcccttgctaacatttttgattcgccaatatgttttgtaaactagaagaataacagaacactgcaactttagaggttttctctcttggtcctaccttgtgtatgtagaaagttaatgtaagcttttcttctgctgcttttaagtaagaccctatgcatcccctcctgtgtttcagcccactggggcattatgctgtaaaggcttgcttgttgcttttagttgagaacttttgcaagattgtcagtgtacattttttatgccacttggaaacttatgtgactattcacaattgttatcaggttgttggggcctttaccataatcttgtacttagaagcagagttctggttttgttggacttcagactggaagctgtgcctgtgttctgcaaggataacctccagaaagaattctgtgaccctgatggtcttgatgattttgtgccaggttgtaattgacatcactgtaactgacaatgcttcttttaagcagagaaatattcctgaggtggctttgtccagtcacaaggggatctgtgacacttttgttttctatacgcatgataaaaaataaaaaattgcctgtctgggg

SEQ ID NO: 7637 - DNA, 2748 bp, Homo Sapiens
  XR_001518
ctgccatgtgaccggcgggtgttctacaagggctgaccagtgggcgggacagaacgcaaagggcgatattaaaagccggactcttccggtgaagcggaggtgtggtggggcttgctgggatcatggcggggaatcactgcgagctcctgccgctggcccgtggcaggctcggggcggggttggggtggcttcttgtgcctcccttaaagcgcggggctcagcgtcctggcccagcgccccagcagcaggtccaagtgggtccggctctacagcggcggcacctacttcctcaccactgggcagacgccgctgtgtcaggacccgaaatccttcctgtacctcttgagccaggccgaccccgacccggactcggacaagacggagttttgttcttgttgcccaagctggagtacaatggcacaatcttggctcaccacaacctctgccacctgggttcaagcgagtctcctccttcagtctcctgagtagctgggattacaggcatgcaccaccacacacagctaagttttatatttttagtagagatggtttcaccatgttggccaggccagtctcaaactcctgacctcgtgatccgcccaccttggcctcccaaagtgctgggattacaggtgtgagccaccacacccagccaattagggctgtcttacaaaaaaaaaaaccaccacgaacctttgcgagaatcgagcgcagcctgtgctggttgtgtaagccgtgggacacacgggaaagccaggaagaagaggaagagcacccccacaccccacccgcgtgaagaagagcaaccccactccccgcccgtgggaagaagagcaccctcacgccgggcccgcaggaagaagagcacccccacgcccggcccgcagcatcccgctggcttcctggccacctctcctcacccatcttagaggcatggccgggctggggcatctttccctccttgggcaggatgaaacaggcgcctatttaatcgacagagaccccacctactttgggcctgtgctgaactacctgagacacggcaagctggtgattaacaaagacctcgcggaggaagatgataccacgagtcaacccaaaagttgctggggagaagttgctctttaatgaattgcatctcatgaatgtatcaggctgtgacctttctgcactctctaatgagttcatgaatttaggccaattatggccacaaatgctgctgctgtcacagagagatgccggataaagaacacccaccaccagtctctgaacagggaggggagaatcaactctgaatgtgatgtagtggccaggagagaggaccatgttcaacaacgccacacagatgcaaatgacttgtttcttcaacaaactgcaagggaaaaaataaaaatgggggaagctacagattaaaatacatgtgtttggataggagagtatttaatggcaaaagaaaaagaaaaaatttaaaaatgaaattgtgcaaaacttatttgaatcctgttcaagtgagcaacaaaacattatgatgtacatgagacaactggaaatataactctgactggacactttgagatattaagcaattaccgttcatttttacatatcaaacagtatggtattgtggttacgcttttaaaaagatttgtattttagcgacacatactggaatttttacagggaaaacccactgaggatgctgggcatcaggtcactagcaccgagtgaattttttacaataagcagtaattctccccagccccatgcatcatagccaatcctaaatgaatgccaatctggaaaagaccaaaataaaccacgtgaagatgggaagagctgctcttggtgatgggagaatggggactctctcttttattgtgcaaactccactttccatcatgcaggaaaatccgtcttgaaggcagctcctctctgtgccgggggtgggtgatccagcctaagctagaatggcggcaagctcaaggcagctgtggccctcaggagagcgtctggagtccacagcacagtgggaagcgcaacggcagctagtctgagggtctggacgatggccatgcacagatgaggacagaggagccactgtagtgactgaagcccacggcatccaccctctccagccagccccgcccacacctgaagcccacagcgtccaccctgtccacccagccctgcccacacctgtggccttcctctccttcctgtttggtgagtgctgcctccacacctggctgcatgccagaaaggcctgcacaggtcagaacacaggtttccaaaccctactccaagtctgaacctccaaggacaccccgagctccccaaggttcttgcatagagggcacaggccagagacagcccaggtgggaagcttactctgagtcagctgccctcaccaagatacatccacaggctcctgtacaaggagaggaggcagaagtccctctctgccaggaggtcctcctcaatctcccaagcccacaccactgccctgctccatctcccaccacctccccctgcagatacgggggccaccctacccaccccacaggaacgatgggaaaacctgcctccctctaggaggagggcgtggcacagctgctgcgcgggtaaggaacctcgctatgccttgctcccatcaacacttttattctagatttgaaggtgttttggggaagccatctctgcacaaaagaagtcaacgcaggaataaattccaagatactgaactacctc

SEQ ID NO: 7638 - DNA, 2102 bp, Homo Sapiens
  XR_001525
atttttcatgtcacataattttggagtatgtcatggacatttgaatattttgttacaaaactggatgctgttaaaatcctctggaaaatatttttggttttttggtttcactttagcgggcagttaacctggttaggttcagactgcctctgtgggctgtggatccagtttgaacttacttttcaaaaccttcgtattgctgttcaggtcccaggtgtgccatccatgccattgtgcagttctcaacgcctttcctctgccgccttgggtcagttcacacatgggcatgttggtggtaaacttgagattgtatacacaaatttagaggacgtttcttctctccgtgacttcccttgtacacaagctcccaagagtttcttttcgtggttctttggtgagaaaactggaattttagcttctttgtgcttttcatacgttttctgtagaggggctcatttcctgaacaaaatggagagagagaaaagttagagaaaaaaataaaatgaattccctcttccatactcttccgatcatcgtctttttcctagttcttttgtcagaagaactctcttttagagtttaggagacagctaccagccacaggtgtgcagactcaggattggggcttgctttgaggcagagctgagagagaagaaaaattaccagatatccacccctccccattgtccctctcccattcatcatcttttctagttctctagccagaaggagtttctcttggaacttttctctgtcttcactcactgcacagttaatgagatttgggctgtcctcaagtctaagctgacatatgtgggagaaaaaaaccaggaaactcactactgttttgagttttgatttctctcgccagtctgcttgcttcaaattacttttcagagtccttgtatatttgctttatgtattctttccaggatttttagtaataatcaatggacaagatagggtggagtgtgctttctccatcttagctagaactgggaccccgtcccccactcgtaaaatataaataatgacttagcatggcacattaggtgggcattagagacaccagggaagcgattacaaatataaatgcccaggttgtatctccagataattaaaaatctttcaggagtaggatccagaaaactatatttaaaagttctctaggttcttgatatactatgtaggttgtggtctgaggaccactacatggggatcatttggaaacttgttagaaatgtagactcaggttccattccagacctgctgaattggaacaagatccccagatggtgcctacgcacagtaaaatttgagcagcactgccctagcatgattctagtgtgcagtcaatgttgaggaccactgtcttagaggattgcgtaaaagcaaatgacgtgtatataaatttagattgtaatattctctgagtataaactcattaggtgcaagctgagctcaccctccatgttttctgtgttcctggttaaagtaagttacctttgatgaaaaccacaggttcatctttgacttcaaatcagatttgttgctattgaagctaattggatcccagctcagctttgtggcttggattcacaccatataaaatcttcaacagacattcattcctttgttcagaacacacaaccttctaacgtgaacctccaattttctaaattcattctttttctacttcacctgaaaccacagatccatggcacttagtttctctgtaacagcagctctaccatggtgtccagaaattttagcccctactatcaagaacaaaacatccttgtacatgtttatacatctttttgagtaggagttttccaccagttgcagggattccctgagtctagagtaatgccacaatgctgctcccttttactcctttctaagcatttctgtcagggagaagacttagattcagttgttcactttaacattttccttagatactctcttagaaaagttgtattctgcgcacttctgttatgaagggagtaagggattgctgagatttgttaagttaccaaactagtcttgatagatgtataattattacatatccaccatcacttcatttagctgggcaa

SEQ ID NO: 7639 - DNA, 2156 bp, Homo Sapiens
  XR_015190
ggggaattcgaatgggagaggcgggcccaaggagggagtggaatggccgcgggcggctcgacgcagcagaggcgacgcgagatggcggcagcttcagcggcggcgatctcaggagctggtcgctgtcggctaagcaagattggagctactcgtcgtccacctccagctcgcgtaagggtggctgtgcgactgcggccatttgtggatggaacagcgggagcaagtgatcccccctgtgtgcggggcatggacagctgctctctagagattgctaactggaggaaccaccaggagactctcaaataccagtttgatgccttctatggggagaggagtactcagcaggacatctatgcaggttcagtgcagcccatcctaaggcacttgctggaagggcagaatgccagtgtgcttgcctatggacccacaggagctgggaagacgcacacaatgctgggcagcccagagcaacctggggtgatcccgcgggctctcatggacctcctgcagctcacaagggaggagggtgccgagggccggccatgggccctttctgtcaccatgtcttacctagagatctaccaggagaaggtattagacctcctggaccctgcttcgggagacctggtaatccgagaagactgccgggggaatatcctgattccgggtctctcccagaagcccatcagtagctttgctgattttgagcggcacttcctgccagccagtcgaaatcggactgtaggagccacccggctcaaccagcgctcctcccgcagtcatgctgtgctcctggtcaaggtggaccagcgggaacgtttggccccatttcgccagcgagagggaaaactctacctgattgacttggctgggtcagaggacaaccggcgcacaggcaacaaggccttcggctaaaagagagtggagccatcaacacctccctgtttgtcctgggcaaagtggtagatgcgctgaatcagggcctccctcgtgtaccttatcgggacagcaagctcactcgcctattgcaggactctctgggtggctcagcccacagtatccttattgccaacattgcccctgagagacgcttctacctagacacagtctccgcactcaactttgctgccaggtccaaggaggtgatcaatcggccttttaccaatgagagcctgcagcctcatgccttgggacctgttaagctgtctcagaaagaattgcttggtccaccagaggcaaagagagcccgaggccctgaggaagaggagattgggagccctgagcccatggcagctccagcctctgcctcccagaaactcagccccctacagaagctaagcagcatggacccggccatgctggagcgcctcctcagcttggaccgtctgcttgcctcccaggggagccagggggcccctctgttgagtaccccaaagcgagagcggatggtgctaatgaagacagtagaagagaaggacctagagattgagaggcttaagacgaagcaaaaagaactggaggccaagatgttggcccagaaggctgaggaaaaggagaaccattgtcccacaatgctccggcccctttcacatcgcacagtcacaagggcaaagcccctgaaaaargctgtggtgatgcccctacagctaattcaggagcaggcagcatccccaaatgccgagatccacatcctgaagaataaaggccggaagagaaaggtgaaagtagctgggggcttaggctacacctggagcccagaactggagtccctggatgccctagagcctgaggagaaggctgaggactgctgggagctacagatcagcccggagctactggctcatgggcgccaaaaaatactggatctgctgaacgaaggctcagcccgagatctccgcagtcttcagcgcattggcccgaagaaggcccagctaatcgtgggctggcgggagctccacggccccttcagccaggtggaggacctggaacgcgtggagggcataacggggaaacagatggagtccttcctgaaggcaaacatcctgggtctcgccgccggccagcgctgtggcgcctcctgaccgtcgtctcctcactccgccttttcaaatttttgtataaccccgtgttgtgtaaatacagtttttgctccggtg

SEQ ID NO: 7640 - DNA, 3817 bp, Homo Sapiens
  XR_015281
gtgaacaggtttggtgccgcgggctggggttagagttacttgttattggtaaatagccactatggagactaaggaccagaagaaacacagaaagaaaaacggtggacccaaagctgcaaagaaaaagaagtggcatctgcaggatctccagctaggagactaagaaaatgcccagaagagaaatgccaatgcttttgcagttcagtctgctgtgtggatgtctcgatcctttcacaggactctggatttgaagacacaaaagcatcatattccagtggttgatggaactccactagagccgccaccaataccggtagtggtgacggggcctccaaagttggaaagagcactttgatataatgcctcattcggaacttcacctggcagaagttcaccgagatcagaggccctgtgacgatcgtgtcaggtaaaaagcgcagactcaccattattgaatgtgggtgtgacattaacatgatgattgatctggctaaagtagcagatctggtactgatgcttatagatgccagctttgggtttgaaatggaaatgtttgagtttctaaacatctgtcaagcacatggctttcctaaaattctgggagttctcacccacctcgactccttcaagcataacaagcaactgaagaagacaaagaagcgattaaaacacaggttctggacagaagtttaccaggttgccaaactgttctacctttctggaatggtgcatggagaatatcaaaaccaagaaatccacaatctgggccattttattacagttatgaagtttaggcctctcatggcaaacttttcacccttatatcctggcagacaggatggaagatttgacaaacccggaggatatccaaacaaacatcaaatgtgaccggcaggtgtcactttatggttatttaagaggagcacacttcaaagataaaagccaaattcacatgccaggacaaggtggggctcacccatgagctggtccagagtctcatctccacctactccaccattgatgccaagatggcttcaagtcgagtgacgctgctttccaattccaaaccacttgggtcagaggctatagataatcaaggggacgagttctcactatgttgcctaggctggtctcgaactcctgggctcaagcaatcctcccgacttggcctcccaaaatcctgggattacatatgtgagccactatgcctggcctgttattcctgtattctaacttatccatcccttatgtgtcagagatggctttggattccctgttctgtgtgctcctgtctggctcctgaacccagctggagaggtgtgtcaatcccaactggtgaagtactgagaggaagctacacaaaaggcagcaaggtactagtgagtggtgtcattgagcaaacacaaagtcgggctcatccaaggatgagattttgccagagaaaggatgagcagcaagtcagggagcttaagcgtcagcctcgagtttgaccagcagcaggggtcggtgtgtccctctgaatctgagatctatgaggcaggagctgaggacaggatggcaggagcgcccatggctgctgctgtacagcctgctgaggtgactgttgaagttggtgaggacctccacatgcaccaggttcgtgaccgggagatgcctgaagctttggagtttaacctttctgccaatccagaggcaagcacaatattccagaggaactctcaaacagatgctttggagtttaactcttctgccaatccagaggcaagcacaatattccagaggaactctcaaacagatgttgtagaaataagaagaagcaactgtacaaaccatgtatctactgagcgtttcagtcaacaatacagctcgtgttcgacaatattccttgatgacagcacagccatccagcattatcttacaatgacaataatatctgtgaccttggagatacctcatcatatcacacaaagagatgcagatagatctttgagcatacctgatgaacagttacactcatttgcggtttccaccgtgcacattatgaagaaaagaaatggaggtgggagtttaaataactattcctcctccattccaccgactcccagcaccagccaggaggaccctcagttcagtgttcctcccactgccaacacacccacccccgtttgcaagctgtccatgcgctggtccaacctgtttacatctgagaaagggagtgacccagacaaagagaggaaagccccggagaatcatgctgacaccatcgggagcggcagagccatccccattaaacagggcatgctcttaaagcgaagtggaaaatggctgaagacatggaaaaagaaatacgtcaccctgtgttccaatggcgtgctcacctattattcaagcttaggtgattatatgaagaatattcataaaaaagagattgaccttcggacatctaccatcaaagtcccaggaaagtggccatccctagccacatcagcctgtgcacccatctccagctctaaaagcaatggcctatccaaggacatggacaccgggctgggtgactccatatgcttcagccccggtatctccagcaccaccagccccaagctcaacccgcccccctctcctcatgccaataaaaagaaacacctaaagaagaaaagcaccaacaactttatgattgtgtctgccactggccaaacgtggcactttgaagccacgacgtatgaggagcgggatgcctgggtccaagccatccagagccagatcctggccagcctgcagtcatgcaagagcagtaaaagcaagtcccagctgaccagccagagtgaggccatggccctgcagtcgatccaaaacatgcgtgggaacgcccactgtgtggactgtgagacccagaatcctaagtgggccagtttgaacttgggagtcctcatgtgtattgaatgctcaggtatccaccgcagttttggcacccgcctttcccgtgtgcgatctctggagctggatgactggccagttgagctcaggaaggttatgtcatctattggcaatgagctagccaacagcatctgggaagggagcagccaggggcagacaaaaccctcaataaagtccacgagggaagagaaggaatggtggatccgttccaaatatgaggagaagctctttctggccccactaccctgcactgagctgtccctgggccagcagctgctgcgggccaccactgatgaggacctgcagacagccatcctgctgctggcacatggctcccgtgaggaggtgaacgagacctgtggggagggagacggctgcacggcactccatctggcctgccgcaaggggaatgtggtcctggagcagctcctgacggggtggacgtcatggcccgagatgcccacgggaacacagcgctgacctacgcccggcaggcctccagccaggagtgcatcaacgtgcttctgcagtacggctgccccgacgagtgcgtgtagtatctgttttatttgactgcagtctccttggtgcaaaaacaaaatgggaaaaataaggataactcagaatttcaaaaggaaatcacaaattcagctagtaatagcattttcagtacttttcgtaaactaagtaaatacacaaaatgttgatttttctgaccataagacatattttatgtccttttgccaaggtggatgtgttagtctcaggccctcctggccacattgcccaagtcacacaggcttctgtattatgtatttagataaaatgtgtgaaaatatatttgaaaaaaaatttcataaatgtgcattgatttttgtacaca

SEQ ID NO: 7641 - DNA, 1009 bp, Homo Sapiens
  XR_015292
agacggcaccgaaagcgaaggaagctcctgctcctcctaaagccgaagccaaagcgaaggccttaaaggccaagaaggcagtgttgaaaggtgtccgcagccacacgcaaaaaagaagatccgcatgtcactcaccttcaggcggcccaagacactgcgactccggaggcagcccagatatcctcggaagagcacccccaggagaaacaagcttggccactatgctatcatcaagtttccgctgaccactgagtcggccgtgaagaagatagaagaaaacaacacgcttgtgttcactgtggatgttaaagccaacaagcaccagatcagacaggctgtgaagaagctctatgacagtgatgtggccaaggtcaccaccctgatttgtcctgataaagagaaggcatatgttcgacttgctcctgattatgatgctttcgatgttgtaacaaaattgggatcacctaaactgagtccagctggctaactctaaatatatgtgtatcttttcagcataaaaaaaataatgtttttcataagaatgacaacttaattagaatcaaatctataagctttaagattttacgtttctagtaagtataatattagcttatttgactagaactcaagcagaataggaatttatgcttgttttatattcaataatgataattttgaagatatagttgttttattacaccaaaaatactatattaatcttatttaactaagttttatccaaatcatgttaacttaagaaacatttgatcagttcctatatttctaggagtttggtgaatatttatttataaatgcttatttttttccaagccaagttagaatagagcacttttagaggttttcataaatgaattttgcaatgctctctggagttaagaaaatatcacatatacataacatacattaatagatacacaaacacaaatagagatttcatagctttcatcctgaaatttcagccatgaatcaggcataaatattctgatgg

SEQ ID NO: 7642 - DNA, 3495 bp, Homo Sapiens
  XR_015313
atgtccctccctaagccctggtctctcttgcctcctgcagggctggtgaattaccagatctccgtcaagtgcagtaaccagttcaagttggaagtgtgtcttttgaatgcagaaaacaaagtcgtggacaaccaggctgggacccagggccagctgaaggtgctgggtgccaacctctggtggccgtacctgatgcacgaacaccccgcctccctgtactcgtgggaggtgcggctgactgcacagaagtcactggggcctttgacttctacacactccctgtggggctccgcactgtgcccgtcaccgagagccagatggtgattgctcacaccaaagccttggacccctcccagcctgtgacctttgtgaccaactccacctacgcagcagacaagggggctctgtatgtggatgtgatccgtgtgaacagctactactcttggtatcgcaactacgggcacctggagttgattcagctgcagctggccgcccagtttgagaattggtgtaagacatcacaatcccattattcagagcgcgtatggagtggaaacgcttgtaaggcttcaccaggatccacctctgatgttcagtgaagaggaccggaaaagtctgctagagcagtaccatctgggtctggatcaaaaacgcagaaaatacgtggttggagagctcatctggaattttgccgatttcatgactaaccagtgtaagtggcagtttagcgcatgggataatgtacccgtcctcattttttcaggttgccttgcccattctggacattttggctgtaagaatattggaaacaaaggggggaacctggtttaatccatgtaggttgtgttgagaatttcctaggaaaagtaagttgtgcttaggaagtaggaaagcagtcaggcccccgcttcccacgtacggtcaaaaagcaaacatgagagtctgctatagtgagatggaaatggctagcttgcctttttcttgtctatttcatagccaaggatgaaggaaaaactggacctcattatggatttacttttgggatacactcattattccagaggagggtaaaaggctgagaagcttaaggtatttcagtctgttttatgttactcatttgcgaaaagcaggctcatcgaatacaggtgagtttcaacgcgtcttgaatatggcagcatttaaaagtcttcagaccaggcatggtggctcatgcctgtcatcccagcactttgggaggccaaggtgggaggattgcttgaggccaggagttcgagaccagcctgttcagcatagcaggacccccatctctacaaaaactaaacagattagctaggtgtggtggtgtgtgcctgtagtcctagctgcttgggaggctgaggcaggcggatagcctgagcacaggagttggaggctgcagtaagccatgattacaccactgcacttgagcctgggcagcagagtgagacctgtctttaaaaaaaaaaaaggagctgggcacggtggctcatgcctgtaatcccagcactttgggaggccgaggcaggcagatcacgaggtcaggagatcgagaccatcctggctaacagtgaaaccctgtctctactgaaaatacaaaaaaaatcagccgggcgtggtggcgggtgcctgtagtcccagctgctcgggaggctgaggcaggagaatggcatgaacccaggagttggagcttgcagtgagccgagattgtgccactgcactccagcctgggcgacagtgagactgcttctcaaaaaaaaaaaaaaaaaaaaaaaaaaagaaagggtcttcaaagacaataagatctgtgctctcacgtagggtggatgaggggctgccaagttagcaatgaatgtttcccatttcttcttagtttatggactttccataaactcaggatggcagtttggttggttggagaaggatatggtgatggcgggagttacaatacattacttataggggaagataggcttttgaaaggttaaagcttaaaagtgagaatggaaaagggatgaatgaatgaacatgatgaggtgagagggaagaggtaaagggaaaaggagaacaagcaactcttctctgcgtggcacctgggatgaatggtttctggggacatccctgatggcagttttgtggagaggtgcaaagctttatgtgttaagaaatgagctgtaggctcagtgcagtggctcacgcctgtaatcccagcactttgggaggccgaggtgggtgaaaagaaaaaatgggctgggcgccgtggctcacgcctgtaatcccagcactttgggaggccgaggtgggcggatcatgaggtaaggagttcgagagcagcctggccaacatggtgaaaccgtgtctctccaaaaaaatagaaaaaacatccctgtatggtggtgagcacctgtagtcccagttactcaggaggctgaggcatgagaatcgcttaaacctcggaggcggaggctgcaatgagctgagatggtgccactgcactccagcctgggtgacagagctgggtggtggctcaagatatgttttgtaaacctgaagatttgagatcatataagccaaatcgaaacttaattggcattcataacttttggttctagagactccatgatcaactaagagccaccaaacatttcccatgtagactattttgaccatgctgactctactgacactgtggttactgaattcactttatctctagaaattaattcttactaatggatgtctgtcactgtaagatccttctctcctctgaaataaggagaacattttaacttcagtagtttaaactagtgtcctaaactatagcattcaaaatgagataatatgctaaagtaatacacaaaccaaaaatcccagtggctaacacaaaaagtttttcttattcattttacatatccagggtaagtcagtaatagacgcagacacacccagagaccaaggatgagttgtgatctgtctgcacacatagttcacaatgcctgagtgagttgtgctttggcctttaaacttccactcatgtttaattaataaagattttgctcaaatgccatttgatgatgagtttcatgacgatgatcaactttaaaagaacttggaagtacaatcctcaagcgtttctggaaatagcagaactacaatatttgagaaaaatattttttaatgtataaaaaattggcagggtaggctagcaagcaagagacctagagaaaagttgatgttacagtctcaagtcgaaaggcaatctgcaggcagaattatttccttgagggatctcagtcttttaatataatcaattgactggatgagccctacaatattttggaaaataatctgcttttctcagaaattactgattttcatgttaatctcatctaacaatactttcagagcaacatctatactggtatttgaatatataactcttttatcttttaaaatatcaaataatacagttatatatac

SEQ ID NO: 7643 - DNA, 833 bp, Homo Sapiens
  XR_015319
atgttctgcttggttcctctgacgatcccagccatccagccccaggtgcccgcaggggagaagtccatggacaatgcccccggtctctggggccccctcctggctgtggcctcccccgggctgggtttcctggtggccctctggagtgcaagagacctggactgggccgactggaccgtcccacaccctgaccaactgcagactaggctgcattcactcaatggcttcttgctgccaattaaaactgtaagtgtgcagggtgactgtcgttcctacagttacgtgtgtggcatctccagtaaagatgaacctgactaggaatcacttatttttctggctaggcttatgcctcgcatgtgtcacaacgttaacagagttatttgtatatttggcccaccagttaaagaacctcctacagatgttactcccactttcttgacaacaggggtgctcagtactttacgccaagctgattttgaggcccataacattctcagggagtctgggtatgctgggaaaatcagccagatgccggtgattttgacaccattacattttgatagggacccacttcaaaagcagccttcatgccagagatctgtggttattcgaacctttattactagtgactccctgactggtatacctgcaacacctggcaatgagatccctgtagaggtggtattaaagatggtcactgagattaagaagattcctggtatttctcgaattatgtatgacttaacatcaaagcccccaggaactactgagtgggagtaataaacttcttgttctattaaaaaaaaaaaaaaaaacagaaagaaaagaaaagg

SEQ ID NO: 7644 - DNA, 1571 bp, Homo Sapiens
  XR_015320
ggatacttgaactctcaagagctgggctctgagcgtcctcgtccagctgccaacttggccaaaggctaagccagcagattgttctgttgccgggcaacgcgacttctaaacctgagggagtgggcatgtgagcacataatggcaccagtgacagagcgaccataatggatgaataagcgcagccagggctggtgaattaccagatctccgtcaagtgcagtaaccagttcaagttggaagtgtgtcttttgaatgcagaaaacaaagtcgtggacaaccaggctgggacccagggccagctgaaggtgctgggtgccaacctctggtggccgtacctgatgcacgaacaccccgcctacctgtactcgtgggaggatggtgattgctcacaccaaagccttggacccctcccagcctgtgacctttgggaccaactccacctacgcagcagacaagggggctctgtatgtggatgtgatccgtgtgaacagctactactcttggtatcgcaactacgggcacctggagttgattcggctgcagctggccgcccagtttgagaattggtgtaagacatcacaatcccattattcagagcgcgtatggagtggaaacgcttgtagggcttcaccagggctggtgaattaccagatctccgtcaagtgcagtaaccagttcaagttggaagtgtgtcttttgaatgcagaaaacaaagtcgtggacaaccaggctgggacccagggccagctgaaggtgctgggtgccaacctctggtggccgtacctgatgcacgaacaccccgcctacctgtactcgtgggaggtgcggctgactgcacagaagtcactggggcctttgacttctacacactccctgtggggctccgcactgtgcccgtcaccgagagccagtggcccattcactcctgtgttcaagagctatttcaggaagtgaacctcatttctggcagtgttcagtccagtgacctcagctctgtgtacccggcagggtggctacgcctctgggggagttggattcaggggatggtgattgctcacaccaaagccttggacccctcccagcctgtgacctttgggaccaactccacctacgcagcagacaagggggctctgtatgtggatgtgatccgtgtgaacagctactactcttggtatcgcaactacgggcacctggagttgattcggctgcagctggccgcccagtttgagaattggtgtaagacatcacaatcccattattcagagcgcgtatggagtggaaacgcttgtagggcttcaccaggatccacctctgatgttcagtgaagaggaccagaaaagtctgctagagcagtaccatctgggtctggatcaaaaacgcagaaaatacgtggttggagagctcatctggaattttgccgatttcatgactaaccagtgtgtcagtttcttggtcgggaatgaaaatagtgccaacctgtgataccttcactctaattttactttctgaggaagttttctgtaatagttatttggtgataattattaatactggtgaaaaatcaatgtaaa

SEQ ID NO: 7645 - DNA, 2283 bp, Homo Sapiens
  XR_015557
atggggagcacccctccagagagggatggctcgcacaggccctcagcccagccccttgcaggctggaccttggagagtgaggccctgaggcaagacatgggcacctggctcctggcctgcacctgcgtctgcacctgtgtctgctcgggagtctctgtctcgggggatggacgagggccaagggctggaacctccacctgcctcaccaacaacattctcaggatcgattgccactggtctgccccagagctgggacagggctccagccccgggctcctcttcaccagcaaccaggctcctggtggcacacgtaagtgcaccttgcgaggcagtgagtgcaccgtcgtgctgccgcccgaggcagtgctcctgccgtccgacagttgcatcatcactttccaaatgcgtgtctgggagggagcaggtcagcctggtggacccggagtacctgccctggagacacgtgaagctggacccactctgacttgcagggcaacatcagctctagccactgcatcctgacctggagcatcggtcctgccttggagtcgaggaccacacttctcagctatgacctatggccttcgagaggcaggaagaggcctgggagtgggcccagcacagggatcacatcgttggggtgacctggctcatacttggagcctttgagctggaccctggctttatccatgaggccgggctgcgtgtccagatggccatgctggaggatgacggggcacaggaggagcgttacacaggccagtggagcgagtgtagccagcccgtgtgcttccaggctccccagagacagggccctctgatcccaccctgggggtggccaggcaacacccttgttgctgtgtccatctttctcctgctgactggcccgacctacctcctgttcaagctgtcgcccagggtgaagagaatcttctaccagaacgtgccctctccagcgatgttcttccagcccctctacagtgtacacaatgggaacttccagacttggatgggggcccacagggccggtgtgctgttgagccaggactgtgctggcaccccacagggagccttggagccctgcgtccaggaggccactgcactgctcacttgtggcccagcgcatccttggaaatctgtggccctggaggaggaacaggagggccctgggaccaggctcccggggaacctgagctcagaggatgtgctgccagcagggtgtacggagtggagggtacagacgcttgcctatctgccacaggaggactgggcccccacgtccctgactaggccggctcccccagactcagagggcagcaggagcaggagcagcagcagcagcagcagcaacaacaacaactactgtgccttgggctgctatgggggatggcacctctcagccctcccaggaaacacacagagctctgggcccatcccagccctggcctgtggcctttcttgtgaccatcagggcctggagacccagcaaggagttgcctgggtgctggctggtcactgccagaggcctgggctgcatgaggacctccagggcatgttgctcccttctgtcctcagcaaggctcggtcctggacattctaggtccctgactcgccagatgcatcatgtccattttgggaaaatggactgaagtttctggagcccttgtctgagactgaacctcctgagaaggggcccctagcagcggtcagaggtcctgtctggatggaggctggaggctcccccctcaacccctctgctcagtgcctgtggggagcagcctctaccctcagcatcctggccacaagttcttccttccattgtcccttttctttatccctgacctctctgagaagtggggtgtggtctctcagctgttctgccctcatacccttaaagggccagcctgggcccagtggacacaggtaaggcaccatgaccacctggtgtgacctctctgtgccttactgaggcacctttctagagattaaaaggggcttgatggctgttccaaagtgttgatggctgggagaaggggccagaggaggagtgaggggtggggtttgtccagccctgggctttccgggctctagagatagcatggtgtaggctcaatgacagttctggggacagcaagttggaggttcaggggcagcttcaggacagcaggatggaggctcagggacaattcctgggaggccagtgccctcgttcctccttgtcctcatcctcccacttgctccaggaaactgagagctgagcctggagcttccagacagtcagtg

SEQ ID NO: 7646 - DNA, 1834 bp, Homo Sapiens
  XR_015669
tttagaaggttagtgttggttcttttattcgattaaacaggaatacacatatatctaccaaagaataggtaagggagaaataagaacactaaaaaaactcggaatcgttaagtgtgaagcatatttggagttaaaagaaccaaatattactaagtaagcagacgcgggcacgcgctgcataccgggatttgtagtcccttccggggcggggtacagcgcgcctgcgcagaggggccgtccctcttccgggcgcatgcgtgcggcagcggcgccaggactgactgcgccgtggaggctgctgcagtgttgtgagttggaagctggggagctcggcatggcggtccccgctgcagccatggggccctcggcgttgggccagagcggtcccggctcgatggccccgtggtgctcagtgagcagcggcccgtcgcgctacgtgcttgggatgcaggagctgttccggggccacagcaagacgcgcgagttctggcgcacagcgccaaggtgcactcggtggcctggagttgcgacgggcgtcgcctagcctcggggtccttcgacaagacggccagcgtcttcttgctggagaaggaccggttggtcaaagaaaacaattatcggggacatggggatagtgtggaccagctttgttggcatccaagtaatcctgacctatttgttacggcgtccggagataaaaccattcgcatctgggatgtgaggactacaaaatgcattgccactgtgaacactaaaggggagaacattaatatctgctggagtcctgatgggcagaccattgctgtaggcaacaaggatgatgtggtgacctttattgatgccaagacacaccgttccaaagcagaagagcagttcaagttcgaggtcaacgaaatctcctggaacaatgacaataatatgttcttcctgacaaatggcaatggttgtatcaacatcctcagctacccagaactgaagcctgtgcagtccatcaacgcccatccttccaactgcatctgtatcaagtttgaccccatggggaagtactttgccacaggaagtgcagatgctttggtcagcctctgggatgtggatgagttagtgtgtgttcggtgcttttccaggctggattggcctgtaagaaccctcagtttcagccatgatgggaaaatgctggcgtcagcatcggaagatcattttattgacattgctgaagtggagacaggggacaaactatgggaggtacagtgtgagtctccgaccttcacagtggcatggcaccccaaaaggcctctgctggcatttgcctgtgatgacaaagacggcaaatatgacagcagccgggaagccggaactgtgaagctgtttgggcttcctaatgattcttgagaggaggttgtagggagaggaggccccggcagaggtcttccttcatgtggttagtttggtctgttctctcggagttggtgggcaccctaaatatttgtaagttggtataaattgtaaacgtctctggtcaggctgcgcatttcgttcttttgctttgtctgtgtattagctctttccattctttgcccccagcatgagttaactcgcgtggactctgcagtgcgagtagtgaccccagcataccttgtcctctggacctcctgtcttctctgcttctgggtgcatggtagactttgtggcatttgatacaacttggacaatacctagtttggagggaggggaatggaagggcatggaagtttttttaaataattaaaaaaatatatatataattttgagaattgagcatttaataaactgacttttgttattatggaacttctaa

SEQ ID NO: 7647 - DNA, 801 bp, Homo Sapiens
  XR_015689
atggctgccgcccccgccggacctgtgtagctggccatcgccaagtcggcgccggcgaggcgaatgcgcagcgagcagtttcccagcaggctgggcgggcggccaacgtggctgggcgtggctgcgtggatgggcgcggccgggctgccggggctccggcccccggcctgagagctgtgcgaccgtacgctcttcttccggcggcaggtgtacgcgtcgctgcccggccgcgaagacgccttccaccgcggcatcttcctcttctgctgccacgagccgccgtgctgtgccgccctgcgagtttctaggaatcagctacccaggaaaaatgatttttactcatatgagccaccttctgagaatccttccccagaaacaggagaatcggtgtatctccaacttaagtctggtgctcatctctgcagtgtttgtggctgtttaggccccaaaacttgctccagatgccacaaagcgtattactgcagcaaggagcatcagaccctagactggagattgggacataagcaggcttgtgcacaaccagatcatttggaccttacaactccagaccacaacttcctttttccagaatttgaaattgtaatagaaacaaaagatgagattatgcctgaggttgcggaaaaggaagattattcagatattatagggagcatggttaagcagtttcaggacttcattcattaagtggttaaacttaatgcttggaagaaaggtctcaatgtgtctagaagagaggtactgagaggaagactcactttggaggctggagcctacaatttt

SEQ ID NO: 7648 - DNA, 3140 bp, Homo Sapiens
  XR_015766
gtggcggccattttgattggtgttggatttatttgtaggagaggctcctgagcgctaggtccgcactgtggtgactgaacccagaagtcggggagcagttgtcctccgctgcacagaggctactctggagctctgtgacggcgcccagcgtgacccactcctgggccaggatacggaccgtcgtgcccatatctcctggctggtcgccctatcctcccgactctgcttaaaaccacgtggttcgatggctgccgcggctacgctgaggctctccgctcagggcacagtgacttttgaagatgtggctgtgaactttacctgggaggaatggaatctccttagtgaggctcagagatgcctgtaccgtgatgtgacgctggagaacctggcacttatatcctccctgggttgttggtgtggagtggaagatgaggcggcaccttctaagcagagtatttatatacaaagagagactcaggtcaggactcctatggcaggtgtgtctcccaagaaggcccacccctgtgagatgtgtggcccgatcttgggagacattttgcatgtggcagatcatcagggaacacatcacaagcagaaactgcacaggtgtgaggcctgggggaataaattgtatgacagtggaaactttcatcagcaccagaatgagcacattggagagaaaccctacagagggagtgttgaggaggcgttgtttgcaaagaggtgtaagttgcatgtgtcaggggagtcatctgtcttcagtgagagtgggaaggactttttgcccaggtcaggattactccagcaggaggccagtcacactggggagaagtcaaacagcaaaactgagtgtgtgtctcccattcagtgtgggggagctcactacagctgtggagaatccatgaaacattttagcaccaaacatatactcagtcagcaccagagactgctcactagagaagagtgttatgtgtgctgtgaatgtgggaagtcctttagcaaatatgctagcttgagtaatcatcagagagttcacactgaaaaaaaacatgaatgtggagaatgtgggaaatcctttagcaaatatgttagcttcagtaatcatcagagagttcacactgaaaaaaaacatgaatgtggagaatgtgggaaatcctttagcaaatatgttagcttcagtaatcatcagagagttcacactgggaaaagaccttatgaatgtggagaatgtgggaaatcgtttagcaaatatgctagcttcagtaatcatcagagagttcacactgaaaaaaaacattatgaatgtggagaatgtgggaaatcctttagcaaatatgttagcttcagtaatcatcagagagttcacactgggaaaagaccttatgaatgtggagaatgtgggaaatcgtttagcaaatatgctagcttcagtaatcatcagagagttcacactgacaaaaaacattatgaatgtggagaatgtgggaaatcctttagtcaaaagagcagcctcattcaacatcagcgatttcacactggagaaaaaccttatgggtgtgaagaatgtgggaaatcttttagttcagaaggacatcttaggagccatcaacgagttcacgccggagaaagacctttcaagtgtggagaatgtgtgaaatctttcagtcataagcgcagccttgttcaccatcagcgagttcacagtggagaaagaccttatcagtgtggagaatgtgggaaatctttcagtcaaaagggcaacctcgttctacaccagcgagttcacactggagcaagaccttatgagtgtggagaatgtgggaaatcatttagttcaaaaggacatcttaggaaccatcagcaaattcacactggggacagactttatgagtgtggagagtgtgggaaatcttttagtcataaaggcaccctcattctacatcagcgagttcaccctagagaaagatcttatgggtgtggagaatgtgggaaatcttttagttcaatcgggcaccttaggagccatcagcgcgttcatactggagagaggccttatgagtgtggagaatgtgggaaatcttttagtcataagcgcagccttgttcaccatcagcgcatgcacactggagaaagaccttacaagtgtggagactgtgggaaatcttttaatgaaaaaggacaccttaggaatcatcagcgagttcacactacagaaagaccttttaagtgtggggaatgtgggaaatgttttagtcacaagggtaacctcattctacaccagcatggccatactggagaaagaccttatgtatgtagggaatgtggaaaattatttaagaagaagtctcacctccttgtacaccagagaattcacaatggagaaaagccatatgcttgtgaagcttgtcagaaattttttagaaacaagtaccaactcattgcacatcagagagttcacactggagaaaggccttatgaatgcaatgattgtggaaaatcatttacccacagctctacattctgtgttcataagcgaattcacactggagaaaagccttatgagtgcagtgaatgtggaaaatctttcgctgaaagctccagtttcacaaaacacaaaagagttcacactggagaaaagccttatgagtgcagtgaatgtggaaaatcttttgctgaaagctccagtctcactaaacacaagagagttcacactggagaaaagccttataaatgtgagaaatgtgggaaattatttaacaagaagtctcacctccttgtacaccagagttcacactggagaaaagccatatgagtgtgaggattgtcagaaagtttttagcaagaaggaccacctcattgcacaccagagagttcacactggagaaaggccatatgaatgcagtgattgtgggaaagagttcacactggtcacaccaccttatgagtgcagtgaatgtgggaaatcctttgctgaaactttcagtctcattaaacacaggagagttcacactggaaaatctagcttcataacacacaggagacttcccactgcagaaatgccttttgaatgtaatgaatgcaagaaagccttcagcctttttattggagcctcaaacattgacatgagaaaaacaccatag

SEQ ID NO: 7649 - DNA, 500 bp, Homo Sapiens
  XR_015834
atggtgtctcactgtggcatcctcaggcgaagctcctgccttttggcagcctctccgggcccagctcctcctgcctcccagtggcctctttcggcccagcccagctcatggctctcggtggccttcccaggccccgcttttgacttttggcagcctcttcaggcgcagaacttgatctccagtcggcctttgaggcccggcctcctgcctctcgaaggcctgcacgggcctggcctcggccttggcctcacagcggactctccacgcccagctagctctcgcctcactgaggcctccccagtccaaagctcctgcctttcggccacttcggcaggtccagctcctgcctgccagtggcctctttaggcccagctcattcctcacgtcggccattccaggccccgtttttcccttccggcagcctcttggcctctaatttgtttatcttttgtgtataaatcccaaaatattgaattttggaatatttccaccattatata

SEQ ID NO: 7650 - DNA, 765 bp, Homo Sapiens
  XR_015850
atgctcgcggcgcctcccccactctccccagtccccgtgggtcggaacctggggactggagtccactggagcagtaggcggcacccgcggggagacaggtgtcagtgcagcccgggaggctcagaatggaagtggtggcctccactaggagcttctgtgctttgggagaatttgtccaaactgtggtcccgtttgttctccaatcctgtgtagacaccatgacccagttgttcaccgtcgtgtcgctttggggaaaagatgagcccgcccggttcctctctgtgcacctcatgcctggggctccgtcccgtcctgggtgggttttcacctgcaccgctggcccctcccccgggagcgttggtggagccggctttctcagccaggagcctgttgcggggtcagcggctggagctcaaggtcggctcaggggactttctcgtgctggaggttggctgcggagcagcctgcatttctcggaaaacagcccagggcctgctccacgccgctgtccacgtcttcaccatcccctcgttgcaggttcgaggccgagctcagacctgtggagcagaagctgagtgcgctgcagtccccgctggcccagaggcccttcttcgaggtgccctcacccctgggcgccgtggacctgtacgagtatgcatgcggggatgaggacctggagccactgtgacgccacccatgagaacgccgctgcggggccgctccacacgtgccacggccaccactgggacaccgccgcttgtgtaa

SEQ ID NO: 7651 - DNA, 2950 bp, Homo Sapiens
  XR_015854
ttgttaccagtatgcatatattttatacataatatatctttaaacataaacctaatacatacatatatacatgtgtagctgcacttgtgcaactcaacagtttttagtgcaaacagaatcttagtaatggaggtaaataaagaatgaataagaggtaaaaatggatatagaagtaaaacacaagacatgggggtataaataaattaaaactaagttctgaaaagtgacttttagtaatagaaacctaaaaacatttcatagaaggcaagaacaaagtctgacaacagagtttagttttagtggacattgtggtagtaaatatgtaagttacttctctcttcagaatacaacagatctcactgggccttccagggtcattattcctagaaataatcccactaaatgcccatcttagcaacgcacatttccatgtgtgagttatttctctctcagccccatttaaaaatgtgaaatttggatttagaaggggacatgtatttaaggaagagaagtgccacacaaataatggagcaattttaccatgaaattaatgtcatgaaaatagatatttctataaatacctcttgtttttattattaagacaatgcagacataaaacacttcatactgtagtttctacattgcagccaaaccacttatcaatggccaataaattacttcactcctatgatagatacaaatgctcgattcaagttcaattaatagaatagtgtcaggatatcatgcagacagcttgcataaatactcgaggaataatagcataccttcagtagattctgtgatttttaagcatgaaaactttgtcttattccaaatttcaaaagatggaataaagaatgttttcatataaaatacatttggaacagttttccttcttaaaaaaaaaggcatctaacccacttgcaacatatactggcaattcatctttgtagttacaaaatcagatagatatatattctttttcatctcatgtgactgtatgtgaacatttcagtaattccaacaatatcaaacagctaaattcaaaatcatataatactttctaataagtgtatacgatatatatcttttgtagccaaaggcagaaagaccttcagttagttgatttcatgtttgggcactagtttatattttatcagataattaaaagtcattagttatttcacagtataaaatattgaatcaattaccaacaggcttttattttctgctcctaatttcgaaatgtatttggactcgaggtatgggaataatgtcactgcttatcaaacaattttctggaaatcttaatgcacaaaaatttccagatttatatattcaaaaataaattatatgttaaatgaaattaagaaaaaaaggcgaggggaaggagaaaatctagtttatattctgtgtgaatagctttcaatatcttccaggtgggggcaaccgtaagccacttttgagagaagggagaacaggctctttaagctccctgagtctagttacagaagacttcctggcagtaacaccgtgaataaaacaaccacaagcttccaggagatgagacttctaggctctgctccagacaacacccggccatgggcaacagggcccaccgccctgggcgcgccgcagcctcggccactccgagtcggctccgatcgcgcacgcgcgccgtgcacctgccccatcgcgcccagctgctgcctgagctccgggcacgcccgcgctgtgccggcggggagtgtccgtcactctcagcgctcaggatctctccctttccaggaccgctaggaagcaggaaatccttttcctctcacgtttacatcccattcattcttcctccgggcaattcaagtccattcacagccgccacagatgcacgtgtgcacgcgcgcagctgcacctttaaagaaactctcaagtcctggcggccagaaaaccagctttcaggcggggcggtggggctccccctccccttgcttcgtctctgcagatctttgtgctctagggagggatggccgcacattctgacgaggacgagggtggtgcataacgcggaggtcaattttgcacagtccaggcaaaagagacccccccccccaccaacatcccttcctgttcagtttccctctctggcccagcgcgaagggcgaggggcgacagaagcccgagggacagaaaaccgaggctcctcagtggccgagttgggagagagtgtgagtccaggagagcccgggggcagcagggagagggtgcagaagctcgagcgcaccgagccagaggccccctcttctcccgccacgcggggctggaggtgcaggcgccggttccgcggcgtggcccggctatgtgtcgctcctccgcgcgccgcccgccgcagcccgtgccctcgggccgccgccgccgccgctgccccccgtcgagcccgcggccgcaccctcgggccgatacttgagccagcagatgacccaggtgacaacgaccgagaagagtgccaggatgctggccaccgacaggcagatgggccccacgggcgagggcgagggcgacccggtggccggtgcctcgccagggggcgccccgcctccgggggttcccccgccgccgtagtggttgacgaagatgaggccggtgaagagcagcaccaccatggagaggaaggagaagaccacgcacacgcagccagcgtttctctgcagaagacagcaagatgccccagggaatgtttgtgaaaaaggatgactggatgggaagcaagctgaagaaaaagaaggaaagaaagagagaaatcagtaaatcaccacacaagaggtggagaagaggacttataaatattgtttctatgacatttgaaaataaatgttttactccatgctaatagtgaatgtgatgtcttcagtttgaagggctttaagtgaagctcattaaaacccactattttcca

SEQ ID NO: 7652 - DNA, 3108 bp, Homo Sapiens
  XR_015889
atggtgaagctctctattgtcctgaccccacagttcctgtcccatgaccagggccagctcaccaaggagctgcagcagcacgtaaagtcagtgacatgcccatgcgagtacctgaggaaggttatcaatactctggctgaccatcatcatcgtgggactgactttggtggaagtccttggttacatattattattgcgtttccgacaagttataaagttgtcattaccctctggatagtttacctttgggtgtctctcctgaagactatcttctggtctcgaaatggacatgatggatccacggatgtacagcagagagcctggaggtccaaccgccgtagacaggaagggctgaggtccatttgtatgcacacaaagaaaagagtttcttcctttcgaggaaataaaattggcctgaaagacgtcattactctacggaggcatgtggaaacaaaagttagagctaaaatccgtaagaggaaggtgacaacgaaaatcaaccgtcatgacaaaatcaatggaaagaggaagaccgccagaaaacagaaaatgtttcaacgtgcgcaagagttgcggcggcgggcagaggactaccacaaatgcaaaatccccccttctgcaagaaaggctctttgcaactgggtcagaatggcggcagcggagcatcgtcattcttcaggattgccctactggccctacctcacagctgaaactttaaaaaacaggatgggccaccagccacctcctccaactcaacaacattgtataactgataactccctgagcctcaagacacctctcgagtgtctgctcactccccttccaccctcagcggatgataatctcaagacacctcccgagtgtctgctcactccccttccaccctcagcggatgataatctcaagacacctcccgagtgtctgctcactccccttccaccctcagctccaccctcagctccaccctcagcggatgataatctcaagacacgtgccgagtgtctgctccatccccttccaccctcagcggatgataatctcaagacaccttccgagcgtcagctcactccccttccaccctcagctccaccctcagcagatgataatatcaagacaactgccgagcgtctgcgggggccgcttccaccctcagcggatgataatctcaagacaccttctgagcgtcagctcactccccttccaccctcagctccaccctcagcagatgataatatcaagacacctgccgagcatctgcgggggccgcttccaccctcagcggatgataatctcaagacaccttctgagcgtcagctcactccccttccaccctcagctccaccctcagcagatgataatatcaagacacctgccgagcgtctgcgggggccgcttccaccctcagccgatgataatctcaagacaccttctgagcgtcagctcactccccttccaccctcagctccaccctcagcagatgataatatcaagacacctgccgagcatctgcgggggccgcttccaccctcagcggatgataatctcaagacaccttctgagcgtcagctcactccccttccaccctcagctccaccctcagcagatgataatatcaagacaactgccgagcatctgcgggggccgcttccaccctcagcggatgataatctcaagacaccttccgagcgtcagctcactccccttccaccctcagctccaccctcagcagatgataatatcaagacacctgccgagcatctgcagttccgcttccaccctcagcggatgataatctcaagagaccttccgagcgtcagctcactccccttccaccctcagctccaccctcagcagatgataatatcaagatacctgctgagcatctgcgggttccgcttccaccgtcagcggatgataatctcaagacaccttccgagcgtcagctcactccccttccaccctcagctccaccctcagcagatgataatatcaagacacctgccgagcgtctgcgggggccgcttccaccctcagccgatgataatctcaagacaccttccgagcgtcagctcactccccttccaccctcagctccaccctcagcagatgataatatcaagacacctgccgagcgtctgcgggggccgcttccaccctcagccgatgataatctcaagacaccttccgagcgtcagctcactccccttccaccctcagctccaccctcagcagatgataatatcaagacacctgccgagcgtctgcgggggccgcttccaccctcagccgatgataatctcaagacaccttccgagcgtcagctcactccccttccaccctcagctccaccctcagcagatgataatatcaagacacctgccgagcgtctgcggcgagcgtctgcgggggccgcttccaccctcagccgatgataatctcaagacaccttccaaacgtcagctcactccccttccaccctcagctccaccctcagcagatgataatatcaagacacctgccgagcgtctgcgggggccgcttccaccctcagccgatgataatctcaagacaccttccgagcgtcagctcactccccttccaccctcagctccaccctcagcagatgataatatcaagacacctgccgagcgtctgcgggggccgcttccaccctcagcggatgataatctcaagacaccttccgagcgtcagctcactccccttccaccctcagctccaacctcagcagatgataatatcaagacacctgccgagcgtctgcgggggccgcttccaccctcagccgatgataatctcaagacacctcccttagctactcaggaggctgaggcagaaaaaccacgcaaacccaagaggcagagggcggctgagatggaaccacctcccgaacccaagaggcggagggtcggtgacgtggaaccgtcacgcaaacccaagaggcggagggccgctgacgtggaaccatcatcacccgaacccaagaggcggagggtcggtgatgtggaaccgtcacgcaaacccaagaggcggagggccgctgacgtggaaccatcatcacccgaacccaagaggcggaggttgagctga

SEQ ID NO: 7653 - DNA, 713 bp, Homo Sapiens
  XR_015916
ctcactgctaggggcttaagcagagggagtcgagccagagtcgccgcgatggtgttgttggagagcgagcagctcctgacggagctgaccagacttttccagaagtgctggacatcaggcagcatcatatcaccttgaagaagtatgacagtcgaaccaaatccattccaaagaaaggtactgtggagggctttgagcctgcagacaacaagtgtctgttaagagctaccgatgggaaaaagaagatcagcacagtggtgagctccgaggaagtgaataagtttcagatggcttattcaaacctcctgagagctaacatggatgggctgaagaagagagacaaaaagaacaaaactaagaagaccaaagcagcagcagcagcagcaacagcagcacagtaaaggacatacatttcctgctttcaccaattaaccactgaattgctattttttccttttggccacatagctaggtttctggttcccccacagtaggtgttttcacataagattagggtctttttggaaagaatagttgcagtgtttataggatagttgtggtaagaatctagtttattttgcatttggctaattggtctgtgctgcatggttatatactcctggattatagataaaaagtctccgtagacatctctgtgaagagcaagctatcattaaacatgtctgtttatcaagaaaaaaaaaagaagccaa

SEQ ID NO: 7654 - DNA, 991 bp, Homo Sapiens
  XR_015987
aaggaagctcctgcccgtcctaaagctgaagccaaagcgaaggttttgaaggtcaagaaggcagtgttgaaaggtgtccataaccacatgcaaaaagaagatccgcatgtcacccaccttcaggcggcccaagacactgcgactccagaggcagcccagatatcctcagaagagcacccccaggagaaacaagcttggccactatgctatcatcaagtttccgctgaccgctgagtcggccgtgaagaagacagaagaaaacaacacgcttgtgttcactgtggatgttaaagccaagaagcaccagatcagacaggctgtgaagaagctctatgacagtgatgtggccaaggtcaccaccctgatttgtcctgataaagagaagaaggcatatgttcgactggctcctgattatgatgctttggatgttgcaacaaaattgggatcatctaaactgagtccagctggctaactctaaatatatgtgtatcttttcaccataaaaaaatgatgtttttcataagaatgacaaattaattagaaccaaatctataagctttaagattttacgtttttagtaagtataatattagcttatttgactagaactcaagcagaataggaatttatgtttgttttatattcaatagtgataattttgaagacagttgttttattacaccaaaaatattatattaatcttatttaactaagttttatccaaatcgtgttaacttaaaaaacatttgatcagttcctatatttctaggagtttggtgaatatttacttataaatgcttatttttttccaagccaagttagaatagagcacttttagaggatttcataaatgaattttgcaatgctatccggagttaagaaaatatcacatatatgttacatacattaatagatatacaaacacaaatagagatttcatagctttcatcctgaaatttcagccatgaatcaggcataaatattctgatgg

SEQ ID NO: 7655 - DNA, 1144 bp, Homo Sapiens
  XR_016232
aagcgctttttcccaagcggctgccgaagatggcggaggtgcaggtcctggtgctcgatggtcgaggccatctcctggtccgcctggcggccatcgtggctaaacaggtactgctgggccggaaagtggtggtcgtacgctgcgaaggcatcaacatttctggcaatttctacagaaacaagttgaagtacctgggtttcctccgcaagcggatgaacacccacctttcccgaggtccctaccacttccgggccccccagccgcatcttctggcggaccgtgcgaggtatgccgccccacaagaccaagcgaggccaggcttctctggaccgcctcaaggtgtttgaccgcatcccaccgccctacgacaagaaaaagcggatggtgttcctgctccctcaaggttgtgcgtctgaagcctacaagaaagtttgcctatctggggcgcctggctcacgaggttggctggaagtaccaggcagtgacagccaccctggaggagaagaggaaagagaaagccaagatccactaccggaagaagaaacagctcatgaggctacggaaacaggccgagaagaacatggagaagaaaattgacaaatacacagaggtcctcaagacccacagactcctggtctgagcccaataaagactgttaattcctcatgcgtggcctgcccttcctccatcgtcgccctggaatgtacgggacccaggggcagcagcagtccaggcgccacaggcagcctcggacacaggaagctgggagcaaggaaagggtcttagtcactgcctcccgaagttgcttgaaagcactcggagaactgtgcaggtgtcatttatctatgaccaataggaagagcaaccagttactattagtgaaagggagccagaagactgattggagggccctatcttgtgagcggggcgtctgttggactttccacctggtcatatactctgcagctgttagaatgtgcaaggacttggggacagtatgagcttgctgttgtacacagggtatttctagaagcagaaatagactgggaagatgcacaaccaaggggttacaggcatcgcccgtgctcacctgtattttgtaatcagaaataaattgcttttaaagaaaaaaataaaataaaaa

SEQ ID NO: 7656 - DNA, 3558 bp, Homo Sapiens
  XR_016668
ttctgagggttaaatgagcatagcacagtgtcaggcacacactacttgccagatgtcgagtattcatctttattgaaataggactgtggtaagccactttatggctctcgattttgtatgagaaaatcatgcttagtgccttgttagtaaaagaaagaaaacctgaaagtccctgccacggaaggaagaaatagcggggagaaaagggagttggtaagtttcagcatttcagagcttggagagggacaagttaggtttccattttatggagaaggaggtggaggcaggatgggtcctaaggtgtcattcaaaacacacagccataactctttattgagagtagcgctagggccccagggattgctgtggtcaagttgcggacaaaaatgaccactcgttggaagacaggagaggagtgtttagttacaaaagcagtcaacaattcaggtgtatctatattcagacagcaaataaaagttgttcaacttggttgctaatgggacccactctactgaggctttgtatagaactcatagaggaagatggcttcaaggaatgaactaccctgtgcttttcttaggactaaaatctcaggaagctggtgatgaatgaaaaccttagtcccactggcactgcacgaggggccaggagagcagcagcatcataagccgcagggtggggcagccaaggcaggggcattctgagctgttggggaggggtggcaggcagggtggggcactgtgagctgtcggggagggcattgtgaagtgtggggtggggcattgtgtgccacatgcctgggctcccacctggggccagtgggcttcagtctgtaggtgactacagaaggaggaggagctccgtctgttctctcttcaggcagttgttgtgtctctcagcacttgttgggttcacaacctattaaataagccggctggtcttcaccctcccagacaagtcaactcaggggaggcagcagggtgcgggccttggccagggccagggccagggccagggccagggctggtgcccggggccgcgctgtgaggtgggcaggcgaggagcgggaagaccatctctgcaagtgcagcatagcctcggcctaggacagcgggagtgcgtggccaaagctgtgagcagaggcacaggtggtggcagacagtagaggcaccccatggggaacatactgacctgtcgtgtgcaccctagcgtcagcctcgagtttgaccagcaacaggggtcggtgtgtccctctgaatctgagatctatgaggcagtagctggggacaggatggcaggagcgcccatggctgctgctgtgcagcctgctgaggtgactgttgaagttggtgaggacctccacatgcaccacgttcgtgaccgggagatgcctgaagctttggagtttaacctttctgccaatccagaggcaagcacaatattccagaggaactctcaaacagatgctttggagtttaacccttctgccaatccagaggcaagcacaatattccagaggaactctcaaacagatgttgtagaaataagaagaagcaactgtacaaaccatgtatctactgtgcgtttcagtcaacaatacagcttgtgttcgacaatattccttgatgacagcacagccatcagcattatcttacaatgacaataatatctgtgaccttggagatacctcatcatatcacacaaagagatgcagatagatctttgagcatacctgatgaacagttacactcatttgcggtttccaccgtgcacattacgaagaacagaaatggaggtgggagtttaaataactattcctcctccattccatcgactcccagcaccagccaggaggaccctcagttcagtgttcctcccactgccaacacacccacccccgtttgcaagcggtccatgcgctggtccaacctgtttacatctgagaaagggagtgacccagacaaagagaggaaagccccggagaatcatgctgacaccatcgggagcggcagagccatccccattaaacagggcatgctcttaaagcgaagtgggaaatggctgaagacatggaaaaagaaatacgtcaccctgtgttccaatggcgtgctcacctattattcaagcttaggtgattatatgaagaatattcataaaaaagagattgaccttcagacatctaccatcaaagtcccaggaaagtggccatccctagccacatcggcctgcgcacccatctccagctctaaaagcaatgacctatccaaggacatggacaccgggctgggtgactccatatgcttcagccccagtatctccagcaccaccggccccaagctcaacccgcccccctctcctcatgccaataaaaagaaacacctaaagaagaaaagcaccaacaactttatgattgtgtctgccactggccaaacgtggcactttgaagccacgacatatgaggagcgggatgcctgggtccaagccatccagagccagatcctggccagcctgcagtcatgcgagagcagtaaaagcaagtcccagctgaccagccagagcgaggccatggccctgcagtcgatccaaaacatgcgtgggaacgcccactgtgtggactgtgagacccagaatcctaagtgggccagtttgaacttgggagtcctcatgtgtattgaatgctcaggtatccaccgcagtcttggcacccgcctttcccgtgtgcgatctctggagctggatgactggccagttgagctcaggaaggttatgtcatctattggcaatgacctagccaacagcatctgggaagggagcagccagggacagacaaaaccctcagaaaagtccacgagggaagaaaaggaacggtggatcctttccaaatatgaggagaagctctttctggccccactaccctgcactgatctgtccctgggccagcagctgctgcgggccaccgctgatgaggacctgcagacagccatcctgctgctggcacatggctcccgtgaggaggtgaacgagacctgtggggagggagacggctgcacggcgctccatctggcctgccgcaaggggaatgtggtcctggcgcagctcctgatctggtacggggtggacgtcatggcccgagatgcccacgggaacacagcgctgacctacgcccggcaggcctccagccaggagtgcatcaacgtgcttctgcagtacggctgccccgacgagtgcgtgtagttctgttttatttgactacagtctccttggtgcaaaaacaaaatgggaaaaataaggataactcagaatttcaaaaggaaatcacaaattcagcttataatagcattttcagtacttctcataaactaagtaaatacacaaaatgttgatttttctgaccataagacatattttatgtccttttgccgaggtggatgtgttagtctcaggccctcctggccacattgcccaagtcacacaggcttctgtattatgtatttagataagatgtgtgaaaatatatttgaaaaaaagttcataaatttgcattgatttttgtacaca

SEQ ID NO: 7657 - DNA, 839 bp, Homo Sapiens
  XR_016722
cctctccttccgccggggccgccgggcctcatggaagccccggagggcggcggaggggggcctgcagcgcggggccccgaggggcaaccggcgcccgaagccagggtgcacttccgagtggcgaggttcatcatggaggcaggtgtcaagctagggatgaggtccattcccattgccactgcttgcaccatttaccataagttcttttgcaataccaacctggacgcttatgacccttacctgattgccgtgtcttccatttacttggccggcaaagcggaaaagcagcacctgcggactcatgacatcatcaatgtgtccaacaggtactttaacccgagcggtgagcccctggaattggaatcccgcttctgggagctccgggacagcattgtgcagtgtgagcttctcatgctgagagttctgcgcttccaggtctccttccagcttccacacaagtacctgctccactacctggtttccctcaaaaactctgaaccgccacagctggcagcggaccccggttgccgtcactgcctgggccctgttgcgggacagctaccacgggggtctgtgcctccgtttccaggcccagcacatcgcggtggcggtgctctacctggccctgcaggtctacggagttgaggtgcccgccgaggttaaggctgagaagccgtggtggcagatttataccatggacacagagatcccctaaggtcctggcccaggcctgtccaaagagaagcccaggatggtcggctgcctggggacattgccaccacgtcgccatgacggctggtcctcagaggaccagctgggaggactggttgtgctgctgg

SEQ ID NO: 7658 - DNA, 6769 bp, Homo Sapiens
  XR_017029
gaagaattatatggtttggctctgtccgcacccaaatctcatcttgaattgtaacaattcccatgtgtcaagggtggggccaggtggagataactgaatcatggaggcagtttcccccatgctgttctcatggtagtgaataagtctcatgaggtctgatggttttataaatggatgttcccctgcacatgctctctcctgcccaccatgtctgactaaattttgtatttttactagagacgggctttcactatgttggccaggctggcctccaactcctgatctcgtgatccgtccaccccgacctcccaaagtgctaggatcataggcataagccaccacacccggcctcttttttttctttttcttttttttatctggagactgagttttgcactcgttgcccaggctggagtgcaatggtgcgatctcagctcactgcagtctccacctcagcaggagagcaggaatcttcagtgatccacgggcaaatatgcagccattgtgggcacctgttcctcccgcgacctttgtgcccacgtctctccctccagtacctactgcacgaccccccacgtccgcctcctgccattgccagcaggtgccttgcgcgggtacctggctgtgcttattcatccattatggtcgctctgtcactggtgccattatgtgctcacatgcccactccctcaggtttagaagtcgcgttgcccggcaacagaacaatctgctggcttagcctttggccaagttggcagctggacgaggacgctcagagcccagctcttgagagttcaagtatccgacagttccccactgctcccaggagcggttacccgggcactctgtgcccctcattcctgtttgggccaaggccgaggacctgcgagtagggctcagttgcctggagccccttcagcccatcccccagttcactttgcttgtgggatctccccgttgctcctgcccctggactgagtggcaggccatcctacaaacacccggacactcgacatcactggtgtcaagacaactctaagaaggttttccgtgatcctgcaagacctgtgttccatcctggtgattccgtcttcaatttcactgcacaggtaccacagtaagccagtgctgtgtgctccgagttccagggcatcccccagcccagccactacactgagcacaaggactctgtggggcccaggagcaggtagtcacccctttggggtccacaacacccggctgtccccagacttgtgtccagggaagatagtgttgagggccctcaaggagagcggggcagggatgcctgagcaggacaaggaccccagagtccaagaaaatcctgatgatcagagaacggtccccgaggtcaccggggatgcacggtctgcattttggcccctgcgggacaatggaggcccctctccctttgtgcccaggcccgggcctctgcagacagacctccacgcccagagctcagaaatcagatataaccacacatcccagacatcctggacgagctcgagcaccaaacgaaatgccatctccagctcctacagctccacgggaggcttgccggggctaaagcagaggagggggccagcctcatcccgctgccagctgaccctcagttactcaaagacagtgagtgaggacaggcctcaggctgtctcttcgggtcacacacggtgtgaaaagggggcagatacagcaccagggcagacaatcgccccaacgggtggctcccccacatcccaggactctaggccccgtagacgcaagattcccctgctgccacgcaggcgaggggagcctttgatgctgccacatcgcttagagctggggtaccgggtcacggctgaagacctgcacctggaaaaagagaaggcattccagcgcatcaacagtgcactgcacgttgaggacaaggccatctcggactgcagaccctcacggccttcccacactttgtcctcacttgcaacaggggcttcgggtgggcctcccgtttctaaagcacccactatggatgcacagcaggacagacccaagtcccaagactgcctgggcctagtggcccccctagcatctgcagcagaggtccccgctacagctcccgtgtctgggaaaaagcacagaccaccaggacccctgttctccaactcagatccccttccggccaactcttcccactcccgggactcagcccaggtcacctcgatgattcctgtccccttgacagctgcaagcagggatgccggcatgagaagaacaaggtcggctcctgcagctgccgcagcagcccctcccccctccacattgaaccccacgtcggggtcactactcaatgcagtggatggaggcccctcacatttcttggcctcagccacagctgcagcacgtgtccagaggtcagaagtgagatataaccagagatcccagacctcccggaccagatcgtgcctcaaacgaaatgccagctccagctcccacagctctacggaaggcctcccgcaactaaagcggaggagggggccagcctcatcccactgccagctggcccacagttcctcaaacacagtgagtgaggatggacctcaggctgtctcttcgggtcaccgctgtgaaaacaaggcaggtacagcaccagggcagacacttgcccccaggggtggctcccccagatcccaggcctctaggccccacatcaacactgcactgcacgttgaggacaaggccatctcggactgcagaccctcacgaccttcccacactttgtcctcatttgcaacaggggcttcgggtgggcctcccgtttctaaagcacccactatggacgcacagcaggacagacccaagtcccaagactgcctgggcctagtggcccccctagcatctgctgcagaggtcccctctacagctcccgtgtctgggaagaagcacagaccaccaggacccctgttctcctcctcagatccccttcctgccacctcttcccactcccgggactcagcccaggtcacctcgctgattcctgccaccttcacagctgcaagcagggatgccggcatgagaagaacaaggtcggctcctgcagctgccgcagcagcccctcccccctccacattgaaccccacgtcggggtcactactcaatgcagtggatggaggcccctcacatttcttggcctcagccacagctgcagcacgtgcccagaggtcagaagtgagatataaccagagatcccagacctcccggaccagatcctgcctcaaacgaaatgccagctccagctccagctccagctcccacagctctacggaaggcctccaggaactaaagcggaggagggggccagcctcatcccactgccagctggcccacagttccccaaacacagtgagtgaggacggacctcaggctgtctcttcgggtcaccgctgtgaaaacaaggcaggtacagcaccagggcagacactcgcccccaggggtggctcccccagatcccaggcctctaggccccgcatcaacactgcactgcacgttgaggacaaggccatctcggactgcagaccctcacggccttcccacactttgtcctcacttgcaacaggggcttcgggtgggcctcccgtttctaaagcacccactatggatgcacagcagcacagacccaagtcccaagactgcctgggcctactggcccccctagcatctgctgcagaggtcccctctacagctcccgtgtctgggaagaagcacagaccaccaggacccctgttctcctcctcagatccccttcctgccacctcttaccactcacgggactcagcccaggtcacctcgctgattcccgcgcccttcacagctgcaagcagcgatgccggcatgagaagaacaaggcctggcacctcggctcctgcagctgcagcagcagcccctcccccctccacattgaaccccacgtcggggtcactactcaatgcagtggatggaagcccctcacatttcttggcctcagccacagctgcagcacgtgtccagaggtcagaagtgagatataaccagagatcccagacctcccggaccagatcctgcctccaaggaaatgccagctccagctcccacagctctacggaaggcctcccgcaactaaagcggaggagggggccagcctcatcccactgccagctggcccacagttcctcaaacacagtgagtgaggacggacctcaggctgtctcttcgggtcacacccgctgtgagaagaaggcaggtacagcaccagggcagacacttgcccccaggggtggctcccccagatcccaggcctctaggccccgcatcaacactgcactgcacgttgaggacaaggccatctcggactgcagaccctcacggccttcccacactttgtcctcacttgcaacaggggcttcgggtgggcctcccgtttctaaagcacccactatggatgcacagcaggacagacccaagtcccaagactgcctgggcctactggcccccctagcatctgctgcagaggtctcctctacagctcccatgtctgggaagaagcacagaccaccaggacccctgttctcctcctcagatccccttcctgccacctcttcccactccggggactcagcccaggacacctcgctgattcctgcccccttcacacctgcaagcagggatgccggcatcagaagaatgtttcgtgttcgaaattgtttgaggggtttgggtttatttttgttggttttttcttttttttttttgcttacgtgggcatccttcagcttttaataatctgaaaaattctatttacccattgtcaatgtgtataaattaatctcagtcaattttatacaataaaaggtgaacttttatccatcaaacaataatttaacaaaaaatgtaccggaagaagaatgttcattacaaatataggaaacataaatattaccaaatattggcaagcactaaaatgttcagaaatataagtctattacagttatagctctctcaagcaaaaaaacagcagagaaaaacttagttttcctgaggggctatttatttacttagggatttgttaaaaggtcaaatggggtcacacagaatactaagaagagctgttcacccaggcctcactaagaactcttcttcatgcagtagctatatagtaatatgacaactgctcctacgacccaaagaggaactacagcaactactctttagcatctgttgctcccaactctgctttgcaattatatgactcaagcattctggctccgttaactattactgctgttactcccaagtaaattccctctaaaaaataaaaatttttaaagctgtaatttaagctctctgctgcctcatgacttcaattccatcagagttacgcattgtttcctctgtacatctttgctctgcttccattgctaattccctagtaaagtgttgtatattcaaagttccaaagaaacagaatatccaagacatcaccaatcatccaaaacacagtgtaggaggccacagttaagagaagcaacaccattagctctttttataggctcgagaacaacaggatgctttggtcctgtatcagcaggatgctttttgggtagatcctactgccaccctactatcgggtagatcctactgtcaccctagctatgggcacatgtcagagtcccatgtaataaaggagacaaaaggaaaccaccacgagtataaactaagaaaagtactccaaggtttctaagaatggagctgtataactcactttgccccgtttgttacttctccacggtacttaccaccacctattacatatattttgtttatagtcagtcttcccccattagaatgaaagttccgtgaggataggactatacagtcagccctcagtatccatgggggactggtttcaggatctcctgagggtaacaaaggatactcaagtccctgatataaaatgacatagtatttgcacatcacctttgcacatcctcccatatacttcatatcaactctagatcactcataatatccgatgtaaatgtcatgcaaatagttattgtactatattgtgtaaggaataaggacaagaaaaaagtctgtacatgttcagtacagacgcaatttttttttccaatatttccaatccttggttgccttaacggatgtagaacccaggaataagttctggtgtcctattgcatagtaggatgagtatagttaacaataacatattatatatttgaaaatagccagaagagtagattttgaattttctccctacagaaaaatcattatgcaaattaccctgatttgatcattacacattgagtacatgtattaaaacatcacattctaccccatatatatgtacagttattatgtgtccataaaaatttaatgtcaatgtgtgaaataaaatgaaaaaataaaaatttttaaagctgtaattatctccatctggtaggaatatatacaatctgaaataaaaaatatatttgtaattgttaggacaaaatagattatacattaagtctgcaaattataaattataaaattctcacagaacctgaaaaattattgatactgttaaatatttaaaaagctgtccttggagagaaagaaacctatcagatttacatcaacaagtgtaatatgtcagcctattaccatctgctacagactgcatgtttgtgttccctcaaaattcatatgataggcccggcgcggtggctcatgc

SEQ ID NO: 7659 - DNA, 1452 bp, Homo Sapiens
  XR_017130
acgctttttcctgggggcagcagccgggctgagaggagagtggctgtctactctctccgccatggcgtgtgtccgcccactgatgtcgctgtactccgaaaagggggagtcatctggcaaaaatgtcacttagcccgctgtattcaaggctcctattcgaccagacatcgtgaactttgttcacaccaacttgcgcaaaaacaacagacagccctacgctgccagtgaattagcaggtcatcggaccagcactgagtcttggggtactggcagagctgtggctcgaattcccagagttcgaggtggtgggactcaccgctccggccagggtgcttttggaaacatgtgtcgtggaggccgaaggtttgcaccaaccaaaacctggcgccgttggcatcgtagagtgaacacaacccaaaaacggtatgccatctgttctgccctggctgcctcagccctaccagcactggtcatgtctaaaggtcatcgtattgaggaagttcctgaacttcctttggtagtcgaagataaagttgaaggctacaggaagaccaaggaagctgttttgctccttaagaaacttaaagccaggaacgatatcaaaaaggtctatgcctctcagcgaatgagagctggcaaaggcaaaatgagaaaccgtcgccgtatccagcgcaggggcccgtgcatcatctataatgaggataatggtatcaaggccttcagaaacatccctgcaattactctgcttaatgtaagcaagctgaccatttcgaagcttgctcctggtgggcacgtgggacgtttctgcatttggactggaagtgctttccggaagttggatgaattgtatggcacttggcgtaaagccgcttccctcaagagtaactacaatcttcccatgcacaagatgattaatacagatcttagcagaatcttgaaaagcccagagatccaaagagcctttcgggcaccaagcaagaagattcatcgcagagtcctaaagaagaacccactgaaaaacttgagaatcatgttgaagctaaacccatatgcaaagaccatgcgccggaacaccattcttcgccaggccaggaatcacaagctccggatggataaggcagctgctgctgcagcagcactagaagccaaaccagatgagaaggcggcggttgcaggcaagaagcctgtggtaggtaagaaaggaaagaaggctgctgttggtgtgaagaagcagaagaagcctctggtgggaaaaaaggcagcagctaccaagaaatcagcccctgaaaagaagcctgcagaaaagaaacctactgtagaggaaaagaagcctgctgcattaactcttaaatttgattattccataaaggtcaaatcattgtggacagcttcttttgaataaagacctgattatacaggcagtgagaaacaaacaaacaaacaaaaatctat

SEQ ID NO: 7660 - DNA, 1292 bp, Homo Sapiens
  XR_017241
atgagcttcaccacttgctccaccttctccaccaactactggttcctgggctctgtccagccacccagctatggtgcctgactggtcagcagtgcagccagcgtctatgcaggcgccaggggctctggttcgcggatctccgtgtcctgttccaccagcttccgcggcggcttggggtccaggggcctggccaagtggatggcccagggtctggcaggaatgggaggcatccagaacaaggagaccctccaaagcctgaacaaccacctggcctcctacctggacagagtgaggagcctagagaccaagaaccagagactggagagcaacacccgggagcacctggagaagaagggaccccaggtcagagactggggccattacttcaagaccatcgaggatctgagggctcagatctttgcaaatactgtggacaatgcctgcattgttctgcagattgacaatgcctaccttgctgctgatggctttagagtcaagtgtgagacagagctggccatgtgccagtctgtagagaacgacatccgtgggctctgcaaggtcattgatgacaccagtgtcacttggctgtagctagagacagacatcgaggctctcagggaggagctgctcttaatgaaggagaaccacgaagaggaagtaaaaggcctacaagcccagctcaccagctctgggttgaccgtgaaggtagatgctcccaaatctcaggacctcgccaagatcatggcagacatacaggcccaatacgacgagctagctcagaagaaccaagaggagctagacaagtactggtctcagcagattgaggagagcaccacagtggtcaccactcagtccgcgcaggtcggagctgctgagatgacactcacggagctgagacatacggtccagtccttggagatccatctggacttgataagaaatctgaaggccagcttctggagaacagcctgagggaggtggagacctgctatgccctgcaggtagagcagctcaacagaatcctgctgcacctggagtcagagctggcacagacccaggcagaggggcagcaccaggcccaggagtacgagaccatgctgaacatcaaggtcaagctggaggctgagagcgccacctgccaccgcctgcttgaagatggcaagaacttcagtcttgatgatgccctggacagcagcaactccatgcaaactatccaaaagaccaccacccgctggatagtggatggcagagtggtgtctgagaccagtgacaccaaagttctgagacattaa

SEQ ID NO: 7661 - DNA, 4841 bp, Homo Sapiens
  XR_017364
cctatggagtgcaatggatgagcctcagcctgggaaaaccaccttcatgatcatggcatctcccctgccagggcttggcccccacagctatggcacagtaagcagattcatcaaaagctgctccattcttctggaagcttcagagaaagggaacacagaaatctggtatgctggtaaaaagggagaactatcctatccctgaaccaggcccaaatgaggtcttgctgaggatgcattctgttggaatctgtggctcagatgtccactactgggagtatggtcgaattgggaattttattgtgaaaaagcccatggtgctgggacatgaagcttcgggaacagtcgaaaaagtgggatcatcggtaaagcacctaaaaccaggtgatcgtgttgccatcgaatctggtgctccccgagaaaatgatgaattctgcaagatgggccgatacaatctgtcaccttccatcttcttctgtgccacaccccctgatgatgggaacctctgccagttctataagcacaatgcagccttttgttacaagcttcctgacaatgtcacctttgaggaaggcgccctgattgatccactttctgtggggatccatgcctgcaggagaggcggagttaccctgggacacaaggtccttgtgtgtggagctggggcaatcggggtagtcactttgctcgtggccaaggcaatgggagcagctcaagtagtggtgactgatctgtctgctacccgattgtccaaagccaaggagattggggctgatttagtcctccagatctccaaggagagccctcaggaaatcgccaggaaagtagaaggtctgctggggtgcaagccggaagtcaccatcgagtgcacggggcagaggcctccatccaggcaggcatctacgccactcgctctggtgggaccctcgtgcttgtggggctgggctctgagatgaccaccgtacccctactgcatgcagccatccgggaggtggatatcaagggcgtgtttcgatactgcaacacgtggccagtggcgatttcgatgcttgcgtccaagtctgtgaatgtaaaacccctcgtcacccataggtttcctctggagaaagctctggaggcctttgaaacatttaaaaagggattggggttgaaaatcatgctcaagtgtgaccccagtgaccagaatccctgatgttaatgggctctgccctcatccccagtctcgggatctcagggcacaatggctggacatgggtgggctctgatgcagaactttctcttttgaatgttaagaataactaatacaattcattgtgaacagaagtccttacgcagaggaattggtgtgccttaaagatacaatctgggatagtttgggggaacttgtagccagaatgccctgttcatgctgagcaaagttcagcaagtagagcagagtttggcaggcaggtgccaggaactccccttcttcctggagtgccttcattgaggaaggaaatctggcccttgggtttcctggttccactgctactgacccagaggggaatgagggctgagttatgaaaagataacttcatgaagacttaactggcccagaagctgattttcatgaaaatctgccactcagggtctgggatgaaggcttgtcagcacttccagtttagaacgcaatgtttctagagacatattggctgtttgttttgatgataaaaggagaataagaaaaggcatcactttcctggatccaggataatttttaaaccaatcaaatgaaaaaaacaaacaaacaaaaaaggaaatgtcatgtgaggttaaaccagtttgcattcccctaatgtggaaaaagtaagaggactactcagcactgtttgaagattgcctcttctacagcttctgagaattgtgttatttcacttgccaagtgaaggaccccctccccaacatgccccaccccacccctaagtacggtcccttgtcaccaggcaaccaggaaactgctacttgtggacctcaccagagaccaggagggtttggttagctcacaggacttcccccaccccagaagattagcatgccatactagactcatactcaactcaactaggctcatactcaattgatggttattagacaattccatttctttctggttattataaacagaaaatctttcctcttctcattaccagtaaaggctcttggtatctttctgttggaatgatttctatgaacttgtcttattttaatggtgggttttttttctggtaagatttggacctaaatcgcatcatgccaacttgtgactttgagactattcatcaagaatgaggatatagtagccatgacatagcttgagctatagcctttaattccttactttggctatgggtggagggtgagtttgaagaggttctgattttcttgtaacctgggaaagccatgaccttgtgcccgattctttcagattgctttgggtaataaatattggtggtggtatctgactcatgctgctgtttatggtcctgtttagtggggaatggactcaggttacccatttcccagagggaaggatcccaggatttttgaaggttacatattttctgtaccaaatataatttcattgacatgaattatctctaatcctcatgacaagccacatacacaatcattttgtagataaagaagatataaatgccagaggagaccttaagattgtcttacaacacaacccttcagttaacgagagaggaaattgaggctcagattggggaagtgacttggcaaatcacacagtgggttagtcaatggcccaggattagacagaacccaggaatcctgacatcaaatcctttacaacatgctgcctctcataggcctgaggtgtccagtcctagaggacaaatgatgctccccatgccaccacccccaccaagcagctcctactgatgagaagatgcactaagcagtcttggtggaaacatcatcctcacgccctgtgccccctttcaggtgcccagagaaggagctcagtgtctgcttcagccagggctttaagagagaaggaagctgggagtgaggggcagaggctctaccagagaatgtctgctggtgtcttggaggcacttcctgcagcctatgcatgcctcgtgaagccatttcactgctgccccttcatcctcctcctccctgagccctaggtagaagtcagtgtgtggaggaggccacccagagatgaccctgaccaggccccaccgcctgtagccagacccagcctctgtcccagctggctgctaatttctgagcattgcttccctgttatttggcctctgtaccttgaacctaggttgacatcatgagcagaggacagttcttaggaaaggcaaatatcccataaatcctatttgcctctctttctcctaacctctggctccaccaactccccaacaggcctcctgcacacacaataggagtcaggagggaggaggcaggactgtgctacacaagggagactgggtggggaagatgtcagagaaccagtgactgagtgcagaggtgacttcacaccagcatctgctgtagccagaggtgggctgcaagagggaattagaggagccaacatgtcctctttctcctttagggtccatggagcagtccgctgcttccaggttgcctgtggggtccttcccagctctccgccctgacacgtcttcactccctagcactcgtggagctgactgggtggggacctcagtgttgactgaaagcgtgaatcaagtgccaggcactggtgacagagcacacagaggctgctgggcctcccaaggtcggggagcttgtggggaattcacattcttggttccgggactgattcactgagtcaatcaatattgattgagcacttagttggttgtggtggtggtaggaatgaattcctgggcttcctgcagcccctttccatgaatctatacatatcaaacatgtgcatgcatttgtaaacattaatgggagtgtactttacttttttcattttactcataaacagacgaggactttaaaaaaatcacaattattaaataattcccattactatacctgacaaaactaataataatttcataatagctaataccccgtcaatccatgccatattttccctcatctaaaaaacagaaaaaattacttttttttcccccaaagacagggtcttgatcagagctcactgcaatatcaaactcctgggttcaagtgatcctcctgtctcagcctctggagtagctgggattataggcatgcaccaccatgcctggctactttttgtagagaaaaaaatttaaaaaggtctcactatgtggcccagagtgttcttgaattcctggcctcaagcaatcttcctgcctcagtttcccaaagcactgagattacaggcatgagccaccatgcccagccaaaactttacttttttacacttgcttttctggaatcaggatctaaacatattgcatgcggttgatatattaagcctgttttattttttattttttcttctttcttaagcctctttattatagttccccctacattttggttcacatgccactgttatgttgaagaaactgggtcctttgtcttctggataccattttacaaacatacttgttttcatttaataaatggctaaatttctttctatgtcaataattatacacatcattattttaaatcaccacatcccattgtgtggatagactatcatttataaagcaaattgcagtattttgagtgtttggatagtttacagagttttgctctaataataaagttgcaatgacaacccttgttgcata

SEQ ID NO: 7662 - DNA, 908 bp, Homo Sapiens
  XR_017397
aggagaagattgctctctcctcccgctgcccaagatgctgaaaggaaagaaggccaagggaaagaaggtggctccggcccctgcagtcgtgaagaagcaggaggctaagaaagtggtgaatcccgtttgagcaaaggcctaagaattttggcattggacaggacatccagcccaaaagagacctcacccgctttgtgaaatggccccactatatcaggttgcagcggcagagagctatactctataagcggctgaaagtgcctcctgcgattaaccagttcacccaggccctggaccgccaaacagcgagctgcataagctggcccacaagtacagaccagagacaaagcaagagaagaagcagagactgttggcctgggccgagaagaaagctgctggcaaaggggatgtccccacgaagagaccacctgtccttcgagcaggagttgacaccgtcaccaccttggtggacaataagaaagctcagctggtgctgattgcacacgacgtggatcccatcgagctggttgtcttcttgcctgccctgtgtcgtaaaatgggggtcccttactgcattatcaaggggaaggcaagactgggacgtctagtccacaggaagacctgcaccactgtggccttcacacaggtgaactcggaagacaaaggcgctttggctaagctggtggaagctatcaggaccaattacaacgacagatacgatgagatccgccgtcactggggcggcaacgtcctggatcctaagtctgtggctcgcatcgccaagctcgaaaaggcaaaggctaaagaacttgccactaaattgggttaaatgtacactgttgagttttctgtacataaaataattaaaataatataaattttccttcaaaactaaactaaactaaact

SEQ ID NO: 7663 - DNA, 2146 bp, Homo Sapiens
  XR_017492
gaaccgaggcggaagtaagggtgagaggaggctgcaacgccgatcggaggaggcaggaaccggagctctagcagtagctgggtgggcaccatggctgggatcaccaccatcgaggcggtgaagcgcaagatccaggttctgcagcagcaggcagatgatgcagaggagcgagctgagcgcctccagcgagaagttgagggagaaaggtgggcccgggaacaggctgaggctgaggtggcctccttgaacgtgggatccagctggttgaagaggagctggaccgtgctcaggagcacctggctactgccctgcaaaagctggaagaagcggaaaaagctgctgatgagagtgagagaggtaagaaggttattgaaaaccgggccttaaaagatgaagaaaagatggaactccaggaaatccaactcagagaagctaagcacattgcagaagaggcagataggaagtatgaagaggtggctcgtaagttggtgatcattgaaggagacttggaacgcacagaggaacgagctgagctggcagaatccctttgccgagagatggatgagcagattagactgatggaccagaacctgaagtgtctgagtgctgctgaagaaaagtactctcaaaaagaagacaaatatgaggaagagatcaagattcttactgataaaataaaggaggcggagacccatgctgagtttgctgagagatcggtagccaagctggaaaagacaattgatgacttggaagataaactgaaatgcaccaaaggggagcacctctgtacacaaaggatgctggaccagactctgcttgacctgaatgagatgtagaacgcctcagtctcaccctgctgctgctcctccctctgaaccagactccgcctgaggccagcctgcccgaagctgacctttaattgagggctgatctttaactggaaggctgctttctcctttcgccgccccctccttccgccgcccgctccttccctgtgtctttttcaccaaactgtccgcctcttcccggagattccagctgggctagaggctgagcacctttggaaacaacatttaagggaatgtgagcacaatgcataatgtctttaaaaagtatgttgtgatgtacacattttgtaattacctcttttgttgttttgtagcaaccttttgtaaaacattccatataataccacagccctgaagcagcgatcgaatccctttctcacttttggaaggtgatttttcaccttaatgcatattcctctctccatggaggagaggaaaaggtataggcctgccttgctgagagccaaacagagcccagggagactccactatgggaagcctcattgctctgtacaaagtactagctaagccagaaaggtggttccaggaggagttagccaaacaacaacaacaaaaaatgtgctgttcaagttttcagctttaagatacctttggataatgttatttctattttttatttttttcattagaagtgaccaaattaagatggcaagacctctgagaccaaaattttgttccatctctaccccctcccaactgcttacagaatggatcatgttccccttatgttgaggtgagcacttaattgcttttcttgcctccttgaaagaaagaaagaaagaaagaagattgtgtttttgccactgatttagccatgtgaaactcatctcattacccttttctgagtttgaagctgctgtctctacaagtgccatctcattgtgctttgtatcagtcagtgctggagaaatcttgaatagcttatgtacaaaactttttaaattttatattattttgaaactttgcttctttgggtttgtggcaccctggccaccccatctggctgtgacagcccctgcagtccgtgggctggcagtttgttgatcttttaaagtttctttccctaccctgtccccattttctggtaaggtttctaggaggtctgttaggtgtacatcctacagcttattggcttaatatgtactctcctttgatgtggtctacttggggccgattgggagaaagagaaatcaatagtgcaactgttttgataatgaatattgacaagtgtctttttgaaataaagaaccagtccttcaaaaaaaaaagacattttg

SEQ ID NO: 7664 - DNA, 944 bp, Homo Sapiens
  XR_017538
cactcccgcgagcacgtgcgcgtcctcgcggctcacatttcggcggagggcgcgctccctggaaaattccactcctgtgctagctccaccctatgcggcttttctcctacccgacgctcttcactctcagctcccttcccggcggcctttgcgggaacaagatggcagccctcatacctcaagggttctcttgtttatcgagggttttgggctggtggtctcggcagccagttctggtgactcagtccgcagctatagttccagtaagaactaaaaaacgtttcacatctcctatttatcaacctaaatttaaaacagaaaaggagtttatgcaacatgcccggaaagcaggattggttattcctccagaaaaatcggaccgttccatacatctggcctgtacagctggtatatttgatgcctatgttcctcctgagggtgatgcacgcatatcatctctttcaaaggagagatgatagagagaactgatagagagaactgaacgaatgaagaagactatggcatcacaagtgtcaatccggaggataaaagactatgatgccaactttaaaataaaggacttccctgaaaaagctaaggatatctttattgaagctcacctttgtctaaataagttgggcccatgagatgtgtgctctgtatattccggaggtacaatttgccagtgtttccacaatggaaccaattgttttacagtctgttccacatgatcattgtaataaggtacagtggatattattttattactgtttgaatatcactgctgggaaatagaaaggaagtctttgtatttttaaaattatagttctccccaacctggctaatacggtgaaaccccgtctctactaaaaatacaaaaattagctgggcatggtggcgggcacctgtagtcccagctattcgggaggctgaggcaggagaat

SEQ ID NO: 7665 - DNA, 2346 bp, Homo Sapiens
  XR_017614
agtcatcatggacaccctccagcccggcttcccttctctctgaaatcctccctgctttgacaaaactgtcagggtctagccaagccaggctggccccaggcctatgccttggccgtctcatcttgccacttccaggaggcgatgactctaaggaggaaagaaatggcgcttcctccccgcttcccccattcatgcttccctgaactccttcttcgagactagattgatattcattttagccttgtcagtctatgacgatacttacttctgaacacaaatcgagggagggagggagaagagtcacacacatctgccctggcctctcctgctccagggcagccctgcaccctatatgctgctgcctcaggcagagccctggaaaatatgtcatttgtgtttttggggaatgtttggacctacttaccctcctggaaatgataaaagttcacaaaatttggaggaagaagaggcgagaacgatccccgaaccgagcaaagcccgcgcgccgctgcatcctgcgcccagtgcctacgtctcaatgccatcgtcgccgccaccatgaccaagagaaaggctgaaggggatgctaaaggagataaagccaagacgaaggacgaaccacagaaaagatccgcgaggttgtctgctaaacctgcttttccaaagccggagcccaagcctaaaatggcccctgcaaagaagggagagaaggtacccaaagggaaaaagggaaaagctgatgctggcaaggagggaatagccctgcagaaaatgaagatgccaaaacagatcaggcacagaaagctgaaggtgctggagatgccaagtgaagtgtgtgcatttttgataactgtgtacatctggtgactatacagtttgaaatactattttttatcaagatttataaaaatgcagaattttattttactttttttttttaagctacgttgttagcacacagaacacttcattgttgtttttaggggaaggggcatacgtcactaatagaatgactccgaagctggattgatatggggaaaacacctttcccttctagtttttagagacttccttttggctcccaggaggagggattccctggctttgatacacatggccaccttggcacaaaaggcttgcggtatggaaaaacaaatttatttttatgtcctcttctccctttccatctttcagcatagacttaactcccttaagcccagacgtctgttgggacctgacccctagtcattggttaccagtgtcaggcaatctggactttccagatgccactgagatggcacctgtcaaaagagcagtggttccatttctagattgtgaatcttcagataaattctgccattttcatttcacttcctgaaagtcaaggttggtttgtgaaaagttaacagcatgctgaatgtgaaatatcaaccctcactctaaactttccctgttcagagcatcagatgaagacttcattgggttttatactggctttctttttggtagtccactgaagaatccagggagtttgaaagttgttgtatactgttaatgattgtctgcccatgtcctgcctgaaataccatgactgtttatggaaagtatctttaataaagctggatacagtttggcttggaaaaaaaaagttcacaaaatttgcagcctgacaatgcaatagaaaaagaaaaactcgctcttggctttcggcttggaggaggccaaggtgcaactttcttcggttgtcccgaatccgggttcatctgacaccagccgcctccaccatgccgccaaagttcgaccccaacgagatcaaagtcatatacctgaggtgcaccggagatgccacttctgccctggcccccaagatcggccccctgggtctgtctccaaaaaacgttggtggtgacattgccaaggcaacgggtgactggaagggcctgaggattacagtgaaactgaccattcagaacagacaggcccagattgaggtggtgccttctgcctctgccctgatcatcaaagccctcaaggaaccaccagagacagaaagaaacagaaaaacattaaacacagtgggaatatcacttttgatgagatcgtcaaccttgctcgacagatggagcaccgatccttagccagagaactctctggaaccattaaagagatcctggggactgcccagtctctgtgggttgtaatgttgatggccgccaccctcatgacatcatagatgacatcaacagtggtgctgtggaatgcccagctagttaagcacaaaggaaaatatttcaataaaggatcatttgacaactagtgaaaaaaaaagaaaaagaaaaagaaaaa

SEQ ID NO: 7666 - DNA, 973 bp, Homo Sapiens
  XR_017634
aattaaaaattgcttcttctccgagaaaacaccaaatggcggatgacgccggtgcagcgggggggcccagagccctggtggccatgggatagggaaccgcggtggcttccacggaggtttcggcagtggcatccggggccggggtcgcgggagtggacggggccgtgccgaggccgcggagctcgcggaggcaaggccgaggataaggagtggatgcctgtcaccaagctgggccgcttggtcaaggacatgaagatcaagtccctggaggagatctatctcttctccctgcccattaaggaatctgagatcattgatttcttcctgggggactctctcaaggatgaggttttgaagattatgccggtgcagaagcagacccgtgccggccagcgcaccaggttcaaggcgtttgttgctatcggagactacaatggccatgtcggtctgggtgttaagtgctccaaggaggtggccacagccatccgtggggccatcatcctggccaagctctccattgtccccgtgcgcagaggctactgggggaacaagatcggcaagccccacaccgtcccttgcaaggtgacaggccgctgcggctctgtgctggtgcgcctcatccctgcacccaggggcactggcatcgtctccgcacctgtgcccaagaagctgctcatgatggctggtatcgatgactgctacacctcagcccggggctgcactgccaccctgggcaacttcgccaaggccacctttgatgccatctctaagacctacagctacctgacccccgacctctggaaggagactgtatttaccaagtctccctatcaggaattcactgaccacctcgtcaagacccacaccagagtctcggtgcagcggacccaggcttcagatgtggctacaacatagggtttttatacaagaaaaataaagtgaattaagcctgaaaaaaaaattttttaaataa

SEQ ID NO: 7667 - DNA, 2074 bp, Homo Sapiens
  XR_017692
atgcgcgccctccccggcctgctgggggcgagggcgcctacgccccggctgcttctcctcctccagtgccttctcgccgccgcgcgcccaagctcggcggacggcagtgccccagacttccctttctgccctccttctcccatgtcatacagtatatgtttcaatccctctgaatataactttcacattttgtcctcttttgtgctaatagaacattctagtatgccagtagaaaaaaacatcactttagaaaggccttctgatgtaaatctcacatgccagttcacaacatccggggatttgaatgcagtaaatgtgacttggaaaaaagatagtgaacaacttgagaataattatcttgtcagtgcaacaggaagcaccttatatacccaatacaggttcaccatcattaacagcaaacaaatgggaagttattcttgtttcttctgagaggaaaaagaacgaaggggaacatttaatttcaaagtccctgaacttcatgggaaaaacaagccattgatctcttacgtaggggattctactgtcttgacatgtaaatgtcaaaattgttttcctttaaattggacctggtacagtagtaatgggagtgtaaaggttcctgttggtgttcaaatgaataaatatgtgatcaatggaacatatgctaatgaaacaaagctgaagataacacaacttttggaggaagatgggggattttactggtgccatgcactattccaattagacgagagtgaagaacacattgagcttgtggtgctgagctatttggtgcccctcaaaccatttcttgcaatagtggctgaggtgattcttttagtggccaccattctgctttgtgaaaagtacacacaaaagaaaaagaagcactcagatgaggggaaagaatttgagcagattgaacagctgaaatcagatgatagcaatggtatagaaaataatgtccccaggcatagaaaaaatgagtctctgggccagtgaatacaaaacatcatgtcgagaatcattggaagatatacagagttcgtatttcagctttgtttatccttcctattaagagcctctgagtttttagttttaaaaggatgaaaagcttatgcaacatgctcagcaggagcttcatcaatgatatatgctatctcagatctaaaggtatattttcattctataattatgttacataaaagcaatgtaaatcagaataaatatgttagaccagaataaaattaattatattctggtctccaaaggacacacagaacagatatcagcagaatcacttaatatttcatagaacaaaaatcactcaaaacctgtctataaccaaagaattcatgaaaaagcctttgtcatttgtcttagaaagttattttttaaaaaaatcatgcttactattagtatctatggaagtatatgtaacaatttttatgtaaaggtcatctttctgtgatagtgaaaaaatatgtctttactaagttgaaatgaatactttctgcctttgctaatgatagttattctataatctccacaagaaaaacataccttttatccagaaatattggtttaaggcaaataaataaaactgtgcttgctctaaagctctgcactacaaaagcaaattttccagtctttattccactcataaccactgctttccccaccaggctaaagtgcttcttagtctttaggtagggttttgaacttcataaggtacaccgttgttcatgttttagggtgcaggtctgtatagttgtaatacttaaaatactgctatactgatgcttttgtggctcatggtttcctgctgtctttgatttaacacctggcttcctggtatctatgactggttaaatatctaaacctgcattattagtgctttacaataataattcccttgactgaagtccagaagtactaaagtacttcttttttattgctgtgaatgccttagacttaccttcaaaagtaggatacttcatttctattgcatatataactgaaatattttataaactcactgtaatcaaatcttataaaatctgaatcgacacgaaaa

SEQ ID NO: 7668 - DNA, 679 bp, Homo Sapiens
  XR_017711
agcttccgtaaaaaccaaaaggattgggtttgattgagcttctggatagctaaacatgtggaagttcctggaggatggtggtcctaaacagggttaccagaaaatttaaagttacgccagtcactcccattctattgctgagagaaaatacagagcggtgaagagcttacagtcgggtgagcaagatacgcccccaatgttagctaatgatgtaaggcatcaacaagaaatgtgggggttcaggaaagtggaaggtggggtcgtccaaagcctgggaaagtcttcagttgaaggcgagacagatgggactattagtgagtttcgagagatccaacgcctcgccgccttcgcttcatttttgtctcacgccccacccttgaacgcgcggcgccttttgaccccgccgccgcgccgtagaccgcgctgcacgccggcggcagccatggcggatgtgtcagagaggacactgcagttgtccgtgctagtagccttcgcttctggagtactcctgggctggcaggcgaaccgactgcggaggcgctacttggactggaggaaaaggaggctgcaggacaagctggcggcgacgcagaagaagctggacctggcctgagactctgcgccttccgccccattctgtccccctcatggccaccttgccatgtccgcgccggagccc

SEQ ID NO: 7669 - DNA, 1702 bp, Homo Sapiens
  XR_017788
cagtccagtgagtccttaattacaaggacgagagaaaagcacggtgcccctcgagtcctctccgccccctcggtcctaacccccgcccaggctccaggtcttcccctttgtgtggcctggactctctcccagctacgactttggtgggatccaaaaggaaggaggtggcggggcctacggaagaggatacccaggagccagggagaagggctagaaaacgaataatgtgactccagaggcggaaccccgaccccctctatttcccaccccggcttcacccggagacgaaagctgtgggcatcttcagtttaacggacttcgcggaaaaggagagaaggggggcgagggaaatggcagtttgtgtcccaggggttcttccccttcttcttgccgcctcctaaagacaaacaaactcaaccccccaccctccggggtatcagggaactcgtgggaccgtgaaaaagtcgttcccaaatccggccgcctgcggacgtcggacttccgcggggccggcgcccgttggcgtctgtagctcggcgcagccacgcggggctccagcgagcggggtccgccacccctcgcgccctcctgcggctttcccagcgctgggccagtgcaggccgagccctgcgtccctgcctcgctgggtgggggtccggggcgcggctgtccacagggccgcctcctcctgcggcccgcggggaaggggcgcatcccaccccgctctgcaggccgcccttctgccagctgggaggcgagggcacacgtcctaaggctgcccaagggggagaggaatcgcgccggtaggagagcgcacgggaaccaggaacgcaaggcgggcacaggggagccgaaggagccagacagggcccggccacgcgccctcctcgctcggctgcgctccgtgacgggaacccaggctcccacgcacggggaatgcctagaacggagctagaatggaggcccctttgtgtgactaaatttggcaagaatatggatctgagccagtctttccacgtgtgctcccagctcccagctgagaaggccaagggttctcttccggatgcagcctttttgaaatttattcttggccaaaagaggaagatagttcaaggattctatcttgcttttggggggcaatggagaaaccctgaaaacacttaaggaaaacctgaggccttctataagaaaataaactccctgaaaggggaggcagggccaaggaatttacttatttttataaatctctttcctgggtggatatggtaatggatgtgtttcttgaattgtggtaaatgtacctcataaaatggatggactggggctatattctcaggcttcctgggctctgttggcattgggcaagcacgtaatgcctggtttgaggctagaagccaaagccacaaccttcttgcagtaccaactgagccatagggagattaatgcagaacaaggtcgttagtctcattgtttatccagttactagccgcatagattttgtgtaaatttcagctacagtggttgcagcctgcctttgatgtgtgtaatctgtacattttagtgctccaggaaagtacctgattgacaagatctacatccaatgcccagaaaacacatcctacacaggcacagtgaagcgtggagttgaagaattttccagtgagttccatcaaagtaaataaaccaacctagagcatcagga

SEQ ID NO: 7670 - DNA, 4459 bp, Homo Sapiens
  XR_017862
ggctttatggaccatgtggtctctgccacaactgctcagctctgccactgtagcacaaaagcagccagagacagtgcgtaaatagatagcatggctgtgttctgatgaagcttcacttacaaatacacagggctgtagtttgccaacccctgcaaagtagggagtattttgccaaacttggctgtatttcaccaaccccttagactatagagatgacttaccctttggcttaatcatgactggaaacttccttcccatccactgcctggatccatccacctccccacaaaggcttcctgagcatctcctccgtgtgagcactggctcaatgcacaggacgatgtagttcctgcccatatggaacttaggttttgagtgacacgtgggacattggaagaggagagcaggtggctaaagagcatcatacagaacagggctcagggaagtcccaggtgatagaatctcaaagagaagggctgagggtgaatcaggaaagccctgaaggcaggcagctccggagtcgggtttagacgaggaggctgcagttctccaggaagggaagcaggaccagataacggatgagattgtgtcaaacaatgaggaggcctgcatagtcacacaggcgcatgaggtctgctcgtaaaggaccaggagggccaggctcaggggtgtggactggattctctgggctgtagggagccactggacagctgtgctcaggagggtcatgtgatcacaaatgcttattagaaatgtcactggctatggaggaccatgtctgtggttgtaagttacgcctttccgtttagtctggacttcctggtcaaggtacttttggtattagagtggggaagagaggcccagagagttggacaggttttctgaccattggcttatagtcagtgagcaccccacctttattttgacatgacagagctttacagaatcttccttcttcaggcgttttctttcctgctatcctaaagattcacgtacgagggcaggataaatgaaacattctgtctccaatctaagttcggcttggggcctcagaatatgaaggtaaaggggcggggacggactgactgccccttgcttcagaatcaagtcacatggcgggaacgctctatggagcagattgcttcctttgtacatgccctaggcccgtgttcagcaggcctcagagaagcagaggtgctggcctctcgtctccagaggctgccagctactaagggaggtggaagcaactacccctgggggtggactgctctgggccgggcccgacgtcaggcgtaggggactgaggtgaatcagacgtggtggctgcattgaggaatgctcagtgtagttggggtgtttgtagcgctttctgctgagcatggtctttcctctcagaggggtttctaggcacgttgaagggagctgccgttcagagcatcggagaggtgccagggacgtgagctgctgccagtctgacgtgaacagaaggtgggaatagctggcgctgccgtgcgttgataggagcacagtgtccgctgcgaaggggcggctagggctggagaaagatggcctgatagaagcgcctccacaggcgctgattcagcgaagccccagcagccccgcggggcaggcgaggatcacatgcagctcggagaagaggaggcacttgcccctctgcctgagctgggaggtggtggccagctgcacacagggctgtcccaggatgctgacgaggcgggaccagccacaggccggcagcgctgcactgtgactccctttcacggggcccagccttgtctctggccttccgggactgagtcaggaggcgagggctacgttgctgccccagcacagtcgggccaggtgtggggaaaggcgggagggaggtgtgctgtgctctgagcagcctggcaggccctggagaggcaggaagccactgcaaacttcagaaactgggtgctgcttcctctcggtgaagttgtgttttgctaatctctgataatcaggtcagggatacagaaggaagagttgcccctgggtggctgctgtctttagacttgtcgggctccctctggtacagaagtgcctctcggattttgctgcctggtcttctctcttatggacatggagtagctctcaggctcttatggtacagctctaagaaggaacacttcttgcattgtctagtgaagtttctgggtttatggaagggaaactgacaaactggagccggcacagatggacactgggtaaagagaatgcagcctgtccctggctgcagtgccaggtgtggcctttcctgtgacagcaagtcacgtgctgtggctccagcttcataggaaggctcttgtctgtcaggcagtggagttacttacagacaagagccttgctcaggccagccctgcccctgcctacaggcacaggtgctttgccatctgtcccgttttcctgcttagggaaccaagatggtcagaaagttgcttgactctaacctaaatatttctgccgcttttgcgagtcagactctttttcttttccttgttcatggaaatggatcaaggagtaggagttttagatagctagggaggtggtgagaagttccgtctccacctgtaatttacaagtcgtgtcttaggtttccagcctctttcctctgttctgggtatctcgtgctctccaccctttagggattttggtgtggtgggtccgtggcaagacactcgatccagacacacgcatttccgaggcacttccatgtcacttaccaagcctccttgtgtgtggatatcacttcactggctccctcaggctgcagccctgacccccaaggtagtgatggcagctggtgcatgaggtttgatttggaagtagccaggcaagccctggttgcaaaaaatacctcttctattccgacagcgggccagaggccgctgccattagacgcatccctctacttacccccgatcacttttcatggtcaggccggccttgcacaagcaggttctgttcactgcgcacccccatttcttagatggggtactgagcactgcttttcccttagctcacttcatgtggcagcttctcagggatgggacctaccatggctgtgggagatgctttgctactacttactacctttccgagggaggagggctcatttttagaaatgttactggggagccaaattgtaggcctccgaccagagggcctcgctctctccatctcccaggaaccaagggtagctctggctctctgaggagctgtctccagcctccaggtggacgtcctttccagcataccagggcttatggaggcaaaatgaaagctggtccacgtgggaactccctactgttgtcctttccttgggcagacaccatatactttttagctcctagcagtgtttatcccgttttccccaaagcatccttggactcaggcctttcatcctggacccatctgtctggcctgttgtgctgagcctttggtctaagtggttggttggtcccagccacttcttcaaaagaaggtttcctgaggtaaccataaattagggcaatcgtacttccaggaacagtgaggctgatgggcctgttcccaagggtactttggcagggggtgctggggaaggggctggcctagggccaggttcatcataccgttagccctgcagccccatgcctgtgtgtcctggtttacccgccgtgtagtggtcctgcaggagtggagcctgtaggacttgcttctcagcggctccaagcagaactctgtctgggaaggtgggaggtgcagccagtctagacctgaagccctcacactaaggactaaggtaggcctgctcagccttagcccttcgtcaggcccaagggtgggggaggcaggaggaggctgagcgtagtcgtggatagaaacctttccctaccgcacggttacacacatggcatgggactcctggctgtagctcactcgggtctactgaagaccaagttggtttttagaaatctatttaaaatatctatcatgtatctatttactgtgtttttctgaatacgcaagtgtaaatagtataatttgcagtgcaaaatccttggcaataactttgtgtattatgtttaaaaacactggaaaccgtgaccaccatggactgcccttcccctctgaggcaattattacatgtaggactctgaactttaaaccttcagcgtgactgaagcagcagcctgcacatgtggatggtcatcagtgcctcgcccagagatacctggccttcatccaaagggaccctgctgccacaagtcctccaggcagcacccgcactgtggctccttcgcactgagtatgttggactctgccatagactgaccctcttgtctggctgctgcagtttgtctgtaatgccctgacatgttgcattctccccatttggataaataaaaacaaacaaatgcttctgtcacacaca

SEQ ID NO: 7671 - DNA, 3232 bp, Homo Sapiens
  XR_017868
gactggaggcgcgcgacgcgggcgcaatggcggggacccggggcttgatgctgcttgggcctggcccagtggcgggtcctagggacgtgggtacctgcagaggccggcagatggagattcagaaacataaggacaacaagaaacttccccaaggtatcattatagtctttagacttcagacacacaccacacctcaaatatatacacaactgaaaggaaaattaaggaagtttttcaaagaaccctattccgagtaagaagtgtgttgcatgaatttctaagaaatgtatttctcacaagtctggagatgggaagtcaaagaccaaagtaccagcagaatggttgtctagtgagggccctcttcctcctagatgacagtctttgcactgtgtcctcaagggtagaaggaatgagccagctctctggggtctcttttataaaagtgctaatcccagtcaagagggctctgccaggggccctgcctcccaatattatcaccttggtgctaaccaatattttctaacttccatttgctactctaatgttaactctgttatctcaattttaataataataatagctgacatttgctgatgacatgccttacactgcattcattaacatctcaatctcatttaatttgaaagagataaagcaacagccaatacacacattaccactttttttcctatcctgttacaaaggagatgaggttgtgggagaactctctttaggcattgttcacatcaggacacttgagaaacagatccttcatatcctttggacaactcttgtacttcagttggctttaagcattatcagagcatccttgacatgatgccaggtcctaacaccgcttcagtgaaagctcagagacaagcaaaagataattgatctattttgtgccgcatgacatactcgatgagcagcaacatatactgtggtgtttggcctccataaactgcagagaaattgaaatatagtaataaactttatgcacggacaaagggtgacctaggatatcactgaactcttctgccttcataaccaaatgtcaaaatgctaatagtctgttccttgtggaaaaatgttgagttttcattcgggagatcaggacttacacactaactcaacctacagtagacacttgctagagaataaaacacaataatgcacgtagaatcgttctgtaaactgtaaagaattttacaaatatgaaattttattatggttttagtcttgtatctattaaatgtatacctattagcatgcacacttttttcttctagcatcaaaggttgcttaaaataacagtggaacatttaaaagcaagagaattctaatttaccatcattcaaattatgttaaatccaactcaactttataagctaaggaacatgtgaaggataaataaaaatttgatagttaagaagataaatatatgcagataaattatgtgatgagtcaaattgattattacaggacaatatactgtattaataaaacagactaaatttaaatgtattgtgcaatggcaaacctagtgccttcttggaaaaacatgccttaacaagctcatgtggttgcaaggttgataatatcttgataataacttatgttgttcttattcctagtaattgctggcctccttatgaccttccgcctagtttcaggcagtagctaggagagctagactaactgctccagagaagtgaggccaaggcatgcaacagagtcacttctccgcttttccatttcaaagtagacaataggggaagatataacaaaagccaaaatttatgcagtaaagaaaaaattggggaagaatgcaattaatgaaagacctacactatacaaggatttcactggacgaagtgaagaatagggagcttgtaaagaagatcaagatagttggacaggtggaatgtctccaagacctttccactcgcctccccacttgttgagcatgggagctgggcaaatggatgatagaccatccagataaattttggcatctaaaagtaattgtcacttgcatcttgtttctcaagaaggaccttgaaagtaagcaaactcctagagctccctaatcccatgcaccacattggcttggagcagcaacagtagcagtagaatagcagagcagggggactcaaggccaagacggtcttgttacaggcaactccctgagcctccttccatccgagaggtacctgagaacctctaaaaatttcatttccccctgaaaggtgagaaagtgactgagagagggctgataaactagggtcctccaggtcgggattgggaaaattcagaatatacatggataaagaaccagggactggccatgataggacctacacctattacttcatatgacttgctaataggagtcaatgctgacagccatagaccttcctgggcttctccctggggcctcaatttcagtccagcgttaagaacttagttttggtctcagggagaaggatagggagatggaaattttacctgagtttaaaaacctgaatttatgcagatatgacattttctggatacattttgacaagagtagaactaggggaatcaaaatagagattatgttgagtaacagggaaatagagttacagttcttgcctatcatctgagtatatggactgaaatactgtacctgctacatacattgtaagcaaagtgaggtcatggccagagcccaagggtttgaggagccttctatgacgtgatgagatggtcttgggtcccctatatgattagcttgtggtggtacattaggactaaatattccaaatgcattaacataaagctgaagtgatgtccttagtgaacttggtcttaaaaattaagagcattttggttgggtgacctaccaacaacatacagggaagagatacaggatcttggttgattctcactgcagtagacattgattttgtggtgtagcagcttgtaaaattaatgcaaatttgagatgaactaataaaaatatagttcatgaaggtgccccactacttgccctacctctcctctcctgttacaatagatcacccatctttgttcccatctgaggactcaggtaatggacttcatctcttcttgtcttctcaaggattttgcatctgccattatcctttctccctcctgtatcctcagttgttttcttctctactggatcaatgtcatcaacatacaaatattatctagtatttctcatatt

SEQ ID NO: 7672 - DNA, 2825 bp, Homo Sapiens
  XR_017875
gtttttgtgcaggaacagcccctcccgtctttgtcctggcggtgagcacccagggctaagcttttgaacactttctttgtgtttggattcagcccaggcaatgcatatttgctttcatttcttcttgagcttgaggagctcctgggtgcaaatcttggaaaatgaggatctctgagcctttccaggccagctctttgttttgtagcagacaattgaggctttgaaaaggaaagtgggtgggggcaccccacaggtggccctcatcacccaattgccagtgcctgcaggctgcttcagcagaggcccagagtcaaagaggacttaaaaccagctgtcgtttctcccttagcttctgtgtatgagagaaacgacttctgtttttcaaagtaagaacaaggaggaatttgtttctaaaagaacattaaaacacaggctcgtggtctaaaagcaaatggttcagcaggatgttcagggccttaaagcacagtcagcaggactcagcatctcccagcacctgctctccggttgtcatggtaacatcatccccaacccaaccaccttgtccagccgagagacagcaatcataaggagggacctcggtttcccccgaggatcctgggcttcctttctgaaacgcttgcttctgagctcagcaaccaggaacaccaggccagcccatccccagcacctctgtggagatgagggacaaagtcctacagtccctcttcctgttctgatgagaaagggagggaagaaaacataccccgagcgcctgcaatatggtcatgacactttcaaaaagcctgtgctatggagtcatgatcagaaaccagagtgtggagagggtcagcagcctgcctcagagcagccagctaggcggggagtggtaaatttgggacttgtacccaggcatgactggctccgagcccagtgctccactctatggaatgttccctgggcctcagttgctttcctttcctttgcaggccgcgggctgctgccactctggcagctggtgagttagctggagggcaacattccaaagcaggggcagcatgctgctttcctcctgtgcccactcctgcggggaagtccgttgactcccaccgctgaagggagctggcaacaccaggatgaggtcccaggggacgggagcaggtacccactgtctgtctaccttcccactggaaaagcacggacaggccagcccttgcgggggcaggcagaggacagagttggctttgcgcggtctctgcctgctgagcagttccaattcctctcatgggagaaacaaggaggcagtcgcttgtgcatgttccagaagttttactggggaggaggaagcggacagaggaagctgtgtgtgcatgtgaaggggtgggcagggtgggagggatgcacgcgtatgtgagcatagcatgtgtgagtactacacacatctccatgcagaagcacaactgggcagccctggcttccagctctgggcttcagcacaacagacaccagcctgtggtctctcagaagccagggagaccacatcgggctcaggacgttttacccaaagtccagagtttttatgcctctccctggcattctccataaagaagggaaggtcagatgaccccttagatctgtgtcatctgggaatttccttgggctggtttagacacgatgccctctttttctcaggatagcagataacctgctttgaaagagggcttaattctgtgggtcctaaattttctcctttctctctctctttctgtgtgtgtgtgttgggaaaatggcaagtttccaataccagctttggaggaacgattacgttttccctccaatttcaagtccgaaagaccagagccctcattccaaagccccccacccagatggattttttcgtttcatttgtcatccgtcccatgggagggccccatgtctcctcagaacccatcctggaggcagcaggtcgggtagagtgagtttggcctgctcatgacctccacccctgagattgtgaacaaggatgtctggggcgatgctgagaatgtttttgaagctgctcccagatgacgctgatgatcacaccagattgagtgctgcgatcgccttgagtccaacctctgcataaacgaggttctcataaacaagttcactctaccctaagctaagtctatgtgagcaaacccacttcatcctttgtacctggagacctggttacactaacctgatactgacctgttcatgtagctggaatggtgtgtttcatgcagtgtggaccaagcaatggcatggggtgtgtgtgtgtgtgtgtgtgtgtctgtgtgtgtgtgtttgtgtatgcgttcacacttgtgtgtgtatatgtgcatgtagatgctgcataaatgatttttgatgtcaaagacaaacacattccattgttttaaatattctattatgtaaacaatacgcagagggaccatatctactcttgtcatattatttgtgatggtaaaacatgcatttgcaataaattaagctttctgggaaggcaagcagtattggagccaaacgactgtctcggaacatgtgtgtgttatctcggttcatatcaagtccaaagctaatggagccttccccgccatccagggaggaacaccaggaccccggagtttcttcttagtgctatattttaaagttgcattgacgttttcctccccttccttttgtgcaagttggaagtagcagtgttctaaaagatggtttgacgtttttgctgttgttttatgtttttaaaaatgtatctgctttgtgtttggaaataaaaatctctattttggtctatgaaa

SEQ ID NO: 7673 - DNA, 2098 bp, Homo Sapiens
  XR_017952
gtgcgcgcgcaggaccgctgaggcgggagccccgaatgcggttctcgcttgctgcgtggcggtaaaggaccgcaggtgtcgtaaaagggccgcagtggcagcgtcctggccgacggctagtagcccattttggataccgtcctcgctgcggaaagttggggcaacctgttgctagtctggtcgttggtgacagcgaggcttccgcgctcgctgctggtgagcagccccggcgtgccccgcgggctggaagaggcggcggcgtgatgcggcccgtggacgcggacgaggcgcgggagccccgcgaggagccgggcagcccgctgagccccgcgccccgcgccggccgcgagaacctggcctccctggagcgcgagcgcgcccgggcgcactggcgggcccgcaggaagctgctggagatccagagcctgctcgacgccatcaagagtgaggtggaggcagaggagcggggcgcccgggccccagcaccccgcccgcgtgcggaggctgaggagcgggtggctcggctgtgcgccgaagcagagaggaaggctgcggaggcggcgcggatgggcaggcggatcgtggagctgcaccagcggatcgccggctgcgagtgctgctgagccggcgaggccgcgcgggtctggagcggagcgcggcggggagtgtcccgcgtggaaggcgctgggtaggcagggaggggagcgcagagccgtgccacgctctccgcggagttggtttcattcttttttcataggtaattagagaaaataatttgatatgttgttgtaaagagtcatgaccactggaagtattttcaggacgtagacctggtgggtcactacgtggggggagagaggtgtgaagcggaggtacatgctggaaacgtgtgaatgttgttacgagattggagcgtttgcgatgaccttcctgcaggtggaagcattgtgcacaggtggttgggtttgtttgactcccggatatgagaatatcaagctcaaaatttatgttgtgatgatgaatttctcccacttgtactttaggtggccaactgacgaactgtgttcacctgataaggagtcgtggctgcttggacaggctcaaaccaagagagcctttcgttttgtctcccctgtttttctgcctgcgttttctccacattagccactcaatttccagtaccatcctggcggatgacttcagcattagatggtcaggtgtatttttttattaataggcgcattcagtttggaaaagacagcttttcattaatgtcccacgtaaaggaatatggcctatacagtacgtacgctgctgcgtggtcatatttgttcctgtgatcttattgtattttcaaagtttggaagtatactcgtgtgctttgctgtttttttatgcttcctggaatttggggactcatgagagacttgaggttagagttctgcaagtgagaagacactacatggttgcagctgccacatgaagaacccaagctcctgtcaaagttgtgaatgcgactttggatgagattaagaaggcccagtggacggttggtcttgaagagtggcagtgtgtggatttgaggacctctgcagaccatcagatcaaaggagggagagctgttttgggtgttttgttttttttgtttttatagcattttgctttttcttggaatgtaattttcctatggcatgttaactggtgcacatcgtgtaacctgtctggtgagcaacctacaattgggatgagttctaggtacatgtgtttgctgactttggggtaaacaactttgttataatacagtctctgccacagatgcatgtgacctcttcaggggcccagagtggctgaggaaggaaagcttcaagctggccatgggggtcccaaacagtcattccaggcttagatgatgactagcctaggtcatcagagcccagactccacagagactaaaatcagagctctgtcttgttatgataaatttcatttgcttggaaaaagaaatgctgaaagccagtgtttagaatctttgtgcagatgaccaaagcaattgacttggccaagaaaaggtaaggtaaataaacatttttcaaaatga

SEQ ID NO: 7674 - DNA, 1989 bp, Homo Sapiens
  XR_017971
gttgagctgtaccatggagcatcctcctgtgtcctgccaacccctgccattatagtcaccggagactcctttacctatccctatctgttagggttttcagatgtcctctcgctgggtttatatttgaaggtatagaatctgggaaagggtggggtgcaagctaaccaaatagggatgctagggttgggtggggaattgaggactcttctgtgcttttattgtagggctggggatcgaggatctgggcaaaaaatatgacatttccaaccagggacaaaatggaggcttgggcttagtgatgggtaaatggaagactggttgagtgggatgataatgggagaacttactgatgctcttttgggaaaaggtgctttaaagactcgatttgggagcctactggggcaaggcgactggggaggtgtacgtgttagtcaagtggaggtcaggtgggttatcttctgcctccttcactggcttcatgtgaacttgcctgtgacagaatatcttgccctagatgtcctcttccctcttgccatcgtgcaaaagcattcgatcttatgaccgtgagttcttatttgtggatgctaactggggtaatctcagggagtactggggccatggctctttcccttgcttctctttctgctcactgctttgctttcaggtgcttagctgctcctttttatttctttgcaggactgggaaagcatgggaggaggattttgataagtttcttgttctctgcgtggtgatggggtggtctgagggccaagttaataagcctacctttggttattaccctggaaaattgagggttgatggtagggttatgattgtggcctgtgtatttgcaatttttctttgtcagtgtggctttctgtcatcttcctttttctccagtgagggttctgccactgtctcaatcccttggttcctgcaaaaaacagctaaatgtgctctcagggccagtggtgatgttctgtgttgcagccccagctcttgaaagtgacctggcccagatgagctctgcctgcttgtcatctttaggtcctgctgcccctgctgcctcagccctcaggctcctaactgctcaagccagaaggagctacaaagccaaatcatttgtcatttttctctggcagattgttttaaaatctccctcccctcttttattttaattatgccacctgtgttaatcctatagcctgcttctttgctttgtggattactgatttcaagttctataacttggggaaagttaggttgagtgaatgggaggacagacactgaatgtgtgttttggaaaaatggactctctatcttcagattattcagcttctccacctatcacctctacaacttggccttcattggagaagttttagttggcttattcctggaacaagaccacctagaggcttttagccttgtcagcctgccctcttctgaggtttggaccttgttttaaattgtgtgcatggtgggcttgagactctcttgtaatggaggtaatgggactatcactgaggggttcagcctatccaggtaggctaccgttctagtcatacccatcacttaaattctgccacagtctgcacagacggttggtcctccaggcatattgtcctattaagccaaataggtggacatcatgggatggatgaggtcatcatgaaaacagatttactggatttatggacctagtatatactatgtaacagatggaaaactgaattttacaatctataggtacctttgaaaggtcataaagggtaaaagtctatagttttccagaaaataattcttaaaactgggttttatgtctagatttaaatcatgtatctgtctgtagtgcttcaaatgtggccaggtgtggtagctcacacctgtaattcccagcgctttgggaatttgaggcaagaggattgctagaggccaggattttgagaccagcttcggcaatacggtgagaccttgtctctaccaaaa

SEQ ID NO: 7675 - DNA, 2285 bp, Homo Sapiens
  XR_017973
acggaatccgggggaggccgaaacccggtagtcgatggaacctctcactgcaaaatctccctgctttttgaggctagagccgagaagaacgccacaggacaacgcgggggaagagggggcacctcccccttaccttgatggctttgtccatgtcgctctcctccgacatactcagtggggcccccacagccgggagaggcggaggctgctcagcagccctgtccccgcgcggccgagggagcaaagggctcggcactcgggcccctgggcctcgtggcgacgggcagcagccgcccctcgggaccggtggggatgaggaccccggcgccggctctgcttcggcgggcggctctaggctggcggcagcagcagcggcggaggcggcggcccctggggacaggtctttgtgctgggccccacgcggccgcctcctagcctcatccccagctggggaggcaggctcctggggtagggcgaggcggggagggcctcgacccggggcgccgtgcaagggcctcgcggggccgccgcttagacctgggctcgccaggtcctaaagaagagcctgcgcctccgcctccgccgcctgcaccgccgcgaagccgaagccgaagccgaagcagagctcggcgccgctgctcccgccgccgcctcagcgccacacatcgccgggacacccgcgccgggcagccccgccggccgccctcacgcacgcgctgtgccccgcgggagctccaggccgcccctcctgccgcccagcttcgtgactccacggccccacgcgccccttgctgccttccgctggggtttccgagccgcccccgaaccgcgcacccgacttgcaggcgtccgcctgggcctccctaagacacgccgcatacaggacaggcccctgggccttccgcggcgatggcgctgcgctaatgacgtcataggcccggactcgcgtgagtgcgcgtgcgttggggcctcagcctttatctccactctgcggagattcacgcctggaaaacgctcttctgagaggatctgtggaggtcaacccaggagagagaagacaggactgaagcactgaaagggtcctgccgttaagggcgcaggattgtatagaatatataatagcagtagcagctctgtttacggagcattaaccttacgtggagttatttcctgcatttcctcctttcgtctttacaaggtagccgtttggcgtcgtgaggtatggatgttcccatccctaatttgcaaaataggtaactgaggctcaggagagctagactagtttgtgcacagccgagaagtggtcaagctagaatgggaccccaggtttgtgctccctactctccaccgataacctatcaaagggctttgcaagagcttttgactaatcgtctgtcaatggttcttcattcacgtattaattgcacatcagtatgtgccaaatctactagacattggagaaacagtaggaacaacacatggtaccggcacatggatctttcaggaaaacgaagtaggtaataaacaggaaaaagcccgagtctgatgctaagaagaacataaacaggatgctgagagattgggtctctccacattgccccggctgctctccaacccctgagttcaagtgattcacctcccttggcctcccaaagtactgggattacaggcgtgagccaccgtgcctggctgagaagatggatttaagacatattttggaggtaacattgtcaggacttcctgaaggattagatgtggaagggaaggataagaaacagaccaaggataactttcaaatgtatgcttaagcaactggatggataatgatgccattgagtgagtgaaaaacttgatggaagtggaagattcagagttcatttctatctaggttaatttgagacataccagagcataagttaagtaagtaattgaatattggagtggagacttatttgtctaccgaattattgttttctttgtcggacatacacctacactgcattcctcaaagtaaaatttaagtgtggctctgtgcctatgctctccccagcggaaagtgaccagaagaggtgtgcagtttccaggcctggcccatacagacctccaacaggtgctcccctgtgctgttactccttctgccaactggaagcagatggtgaccaggctctggagaaggcaaggcctgaagatgggagattcctaagtggaggagaactgtgccttactgacctaaatatccactcagtattgttatgtgagaataaataaacttgtgttgaccgttt

SEQ ID NO: 7676 - DNA, 2941 bp, Homo Sapiens
  XR_018004
agcatagctaagacaggactcgatattgcgaaaccaaacttggtataagagctcccaacactgctaaactggtcatcgctaaacctttaaaaaaaaaaaaaaagcattcgctggtacccagatttccacaggagttaaacatttcctgcgcagctaaagcaagtcttaccagtaggaaaccggaacttgctaggactaagaaacttgaggctaggctgaccccatggttgttatgattagaaatccgaggccactggaaacccggagctgctgaccaacgagtcacagggtaacttcgccttcgcatggggaaacgggtgagttcctacggcctagatatcgcagccagggctagaccggtgtttgtcttaagtcaggacttgcttgggctgagaaaatacattttggctattcccctacttggacagagggtggaaatcccaggcaccgcgaaatcgaaacttgctaggactaagaagccaacgacgcgcgaaaccgtggggtcctgcgacagagacgccggcggcgccgccacaggactgcgttctggaggccgagccggaacccgtgcggcggcgctgggaagagactgtgcccctgcagctcccctgtcaccggctccaaggagcgtcgggctccccccgcccagccctgcagcacccatccggcaacgccagactcggcgcaacgggggcagctgcgactttaaatctctcagatccgcggcctgagggctgccgccaccgagaaatggaggcacagagctgtgaacaagagaccacggctcgccgaaatggcggtgccaggagcctgaaagggaatgcagccggcggggttgtcaaggacaacatttgttttggcgcaaccagcggtgccgtcaccaagaaaccgtcgactctgagaaaaaaagagaagttcggctaccgagaaactccgtgcagcaagtgctgtgacagcaaaaccgccggcttcgcgccgctggcgaaagagccaacggaaacgccgggtgctgcgaccgcgaagccggcactagagggcctcggatggagaaagccccgcaccgagacgaggaaactgtgcacagcacgactagcagttgacacaaacagaaaagtgtctcgtctgctctctgggagaaagcgtggatcaaaaccagcaactcagtggagagaaccccgcagccactgaagaagttgcccacgtggcggtggggccagagaaacaccgcgatttcgacgacagccgtagggataccacagagaaacatgcgcggccacagaagtacatccagctccgcgcaatcagtggttctgcgatccagaaaccgccagctgggctagactagaaacttctaaaaaactgtcgtcccatagcagctttcctaaccacgacagacagtcgcctttagagagcacctaacggtgctgagaccggcctgggccagcaaaagcgcagagcggtgccagtgccaagaaacgcccgacttggtgaaaccaaccttgtgaccaccgattccactggcttcgcaggacgcaacgggcgaaggcgcggcggagaaaccgcaggctcccttcaccgattatgctgcgggctggggatggtggggggcacccgcgaaattgtgaaaccagcggcgctgggacccagcgatcagctgcccgtagcaaatgtctgtgcagttgcaaaagataatttttggccgtgagaaggttgccgccagagagcgtccgataacgctgacaaaggcgtggcgttgccagtgagaaacagccggcgctgggaaaggaacggtgcagcgaccgaccaactgcgcgctcggtgccaccaaagtgctactggctctacccactctgtcccccacgggcttagggaagtctgatgtctttttcttttcttttttcctctgtcgcctaggctggtgcagtggtgtcatcttggctcagtgcagcctcgacttcctgggatccagcgatcctcccgcttcagcctctagagtagccgagaccacaggatttggaagagggcaggagagaaaaatgaactgcaagactccagcacaagaggtgggattgctggcagatgtctgctccctctccaaacctaatgaacatctcaaagtgccatccactttcctatacccttgatctgtgaaatggatcactgacgctttctctgtctttccggaaatgcaaaacaggtgaattttcaagcgcttgaattgtctctcacacttttcagtcaagagtggggctataaactccttcctcataggaaataaggaactgccactgcttggaagtaaaacgtatttttcccataagctttcacatttcccaaaaaaaattatacatccagatgtaatccccctaagaggcttacagaccctaccaggagcgttcccacgcgaacgcatcatctcccaatcggatcctgaaaacaccatgcaaccaattccatccttttctggatcaacctgggcagaggacaggtgcagaggagcccagagaagggccttgacaagtcaggagacccaatttggggtcgcaattgtcactcactccccaggcgtttgctttgatcttcccctcccaccatactacttcttctgctacctggtttctccctggtatttgaggatcctccaattgccttctggtcttacagacgggagaataaaggaaaaatggcatcgtttccaccttaaaagttacaagcacttcaccagatggtacagcctaggtagagcctttgtaaaacaaatgcccgcccactgcttcaccctcctcatttccacctcagcaaagcattttagcagaaaagctgacccagagcagtagctccctgctataatcctagcactttgggaggctaagtcaggagtatctctttagcccagaagttcaataccaccctaagcacaaagtgagatcccgcctctacc

SEQ ID NO: 7677 - DNA, 896 bp, Homo Sapiens
  XR_018104
atgttctctcatgcgggcatcactgggctgttggcctggaccttgcagccacaatggattcaagttcgaaatacagcaacttcgaaagatgttaccaagcgactaaagtccatcaaaaacatccagaaaattaccaagtctatgcaaatggtagcagcagcaaaatacgcccaagctgagagagagctgaaaccagcttgaatatatggattgggatctttggctctggagaaaaagctggtatcaaggtgcctgaagacaacaagaaacacctccttattggtgtgtcctcagatcgaggactgtgtggcgctattcattcctccattgctaaacagatgaaaagcgaggttgctacactaacagcagctgggaaagaagttatgcttgttggaattggtgacaaaatcaggggcgtactttacaggatgcattctgaccagtttctggtggcattaaaagaagtgagaagaaatccccctgcttttggaaatgtgtcagtcattgcccttgaattactaaattctggatatgaatttgatgaaggctccatcgtctttaatcagttcaagtctgtcatctcgtataagactgaagaaaagcccatctttttccttaataccattgcaagtgccaagagcatgagtatctactataatattgatgctgaggtgctgcaaaattaccaggaatacagtctggccaacagcatctactactctctgaaggagtccaccactagtgagcagagtgccaggatgacagccatggacaacaccagcaagaatgcctctgagatgattgacaaattgacattgacattcaactgtacccgccaagctgtcatcacaaaagagttgactgaaattatctttggtgctgtagctctggattaa

SEQ ID NO: 7678 - DNA, 640 bp, Homo Sapiens
  XR_018261
atggcagaggtgcaggtcctggtgctcgatggtcaaggccatctcctgggccgcctggcggccatcgtggctaagtagttactgctgggccggaaggtggtagtcgtacgctgcgagggcatcaacatctctggcaatttctacagaaacaagttgaagaatctggctttcctcggcaagcggatgaacaccaacccttttcgaagcgcctaccacttccgggcccccagccgcatcttctggccgacagtgcgaggcatacatgctgcgccacaagaccaagcgaggccatgcctccctggactgcctcaaggtgtttgacggcatcccaccgccctacgataagaaaaagcggatggtggttcctgctgccctcaaggtcgtgcgtctgaagcctacaagaaagtttgcccttctggggcgacaggctcaagaggttaggtggaagtaccaggcagtgacagccaccctggaggagaagaggaaggagaaagccaagatccactactggaagaagaaacagctcatgaggctacggaaacaggccgagaagaacgtgaagaaaaactgacaaatacacagaggtcctcaagacccacggactcctggtctgagcccagtaaagactgttaatttctca

SEQ ID NO: 7679 - DNA, 2769 bp, Homo Sapiens
  XR_018325
ggtgttttagacatgaagtccttgcccatgcctatgtcctgaatggtattgcctaggttttcttctagggtttttatggttttaggtctaacatttaagtctttaatccattttgaattaatttttgtataaggtgtaaggaagggatcaagtttcagctttgtacatacggctagccagttttcccagcaccatttgttaaatagggaatcctttccccatttcttgtttttgtcaggtttgtcaaagatcaaatagttgtagatatgtggtattatttctgagggctctgttctgttccattggtctatataagaaataattctctctttgacatgggctttctttttaagaacccaaggcattgttttgtagagagtctctaaatttagacttgcataatttttttcctttattatattcaggttaaatgtttttgacacatatactacataggacatgttgatcttagtgggtcacatcaagaaccacattatgtcagtttatctcacagtaataatgctaaatttgaccacttagataaggtggtatagataccatcaagtttctccactataaagatattttttcccgttgaagttaatcagtggggtgacatttggagactgtgtttcctaaaaacctttcacctaattattttagcatgcatgtttttggtggttgcaaaataaattgaggctttgttgaataataggagatagccaaacaaatagagcaagggtatagcattctaattataaagacaaagtcttggaacagcaaaaaatacattatgctccaggacttgcatgtagtctggtatggctggactatatagcaaagatggaagagtgactgaatgtatctccaggttcatcaggcatgaaaacctttggttcctccgcggtcttctgagcggtcacgtgaacggcttcctgcaggctggccatggcgcttcaagttcccaaggctccgggcttcgcccagatgctcaaggagggagcgaaacacttttcagaattagaagaggctgtgtatagaaacatacaagcttgcaaggagcttgcccaaaccactcgtacagcatatggacgaaatggaatgaaaaaaatggttatcaactacttggagaagttgtttgtgacaaatgatgcagcgactattttaagagaactagaagtacagcatcctgctgcaaaaatgactgtaatggcttctcatatgcaagagcaagaagttggagatggcacaaacattgttctggtatttgctggagctctcctggaattagctgaagaacttctgaggattggcctgtcagtttcagaggtcatagaaggttatgaaatagcttgcagaaaagctcatgagattcttcctaatttggtacgttgttctgcaaaaaaccttcgagatgttgatgaagtctcatctctacttcgtacctctgtaatgtgtaaacaatatggtaatgaagtatttctggccaagcttattgttcaggcatgcgtatctatttttcctgattctggccatttcaaagttgataacatcagagtttgtaaaattctgggctgtggtatcacttcctcttcagtattgcatggcatggtttttaagaaggaaacagaaggtgatgtacatctgtcaaagatgcaaaaatagcagtgtactcttgtccttttgatggcatgataacagaaactaagggaacagtgttgataaagactgatgaagaattgatgaatttaagtaagggagaagaaaatctcatggatgcataagtcaaagctattgctgatactggtgcaaatgttgtagtaacaggtggcaaagtggcagacatggctcttcattatgcaaacaaatataatatgatgttagtgaagctaaactcaaaatgggatgtccgaagactctgtaaaacagttggtgctacagctcttcctagattgacacctcctgtccttgaagaaatgggacactgagacagtgtttacctctcagaagttggagatactcaggtggtggtttttaagcatgaaaaggaagatggcatcatttctaccatagtacttcggggctctacagacaatctgatggatgacatagaaagggcagtagatgatggtgttaatactttcaaagttcttacaagggataaacgtcttgtacccagaggtggagcaacagaaattgaattagccaaacagatcacatcatatggagagacatgtcctggacttgaacagtacgctattaagaagtttgctgaggcgtttgaagctattccccgtgcactggcagaaatactctggagaaaactctggagttaaggccaatgaagtaatctctaaactttatgcagtacctcaagaaggaaataaaaatgttggattagatactgaggctgtagtccctgctgtaacggacatgttggaagctggtgttctagatacttacctgggaaaacactggtctatcaaactcgctgctaatgctgcagtcactgtacttagagtgggtcaggtaatcatggcaaaaccagatggtgggcccaagcctccaagtgggaagaaagactgggatgatgaccaaaatgattgaaattggcttaatttttactgtaggtgaaggctgtatttgtagtagtattctaagaatcgcgtgatgttttcttattctccttacattaagaggtattttgtgtttgtattcttggctggatgttataataaacatattgttactgtcaaaaaaaaaaaaaaa

SEQ ID NO: 7680 - DNA, 1349 bp, Homo Sapiens
  XR_018564
gctgaaaaaacatcattaaagtctctcttctccctgccgtcctgtctaagtcagagtctcctaaagagcccgaatagctgaggaagctcttcattggagggttgagctttgaaacaaccaatgagagcctgaggagccattctgagcaatggggaatgctcctggactgtgtggtaatgagagacccaaacaccaattgctccaggggctttgggtttgtcactatgccactgcggaggaggtggaagcagccacgaatgcaaggccacacaaggtggatggaagagttgtggaaccaaagagagctgtctcaagagaagattctcaaacaccagatgcccacttaactgtgaaaaaggcatttgttggtggcattaaagacactgaagaacatcacctaagagattattttgaagagattattttgaacagtttggaaaaactgaagtgactgaaatcatgactgaccgaggcagtggcaagaaaaggggctttgcctttgtaacttttgacgaccatgactccgtggataagactgtcattcagaaatgccatcctgtgaatggccacaactgtgaagttaggaaagccctgtcaaagcaagagatggtgagtgcttctttcagccaaagaggtgaagtggttctggaaactttggtggtggtcgtggaggtggtttcagtgggaatgacaactttggtcatggaggaaacttcagtggtcatggtggctttggtggcagccatgatggtggtggatatggtggcagggcggatggctataatggatttggtaatgatggaagctattttggaggtggtggaagctacaatgattttggcaattacaacaatcagtcttcaaattttggacccatgaagggaggaaactttggaggcagaagctctggtccctatggtggtagaggccaatactttgccaaaccatgaaaccaaggtggctagggcggttccagtagcagcagtagctaaggcagtggcagaagattttaattaggaaacaaagcttagccggagaggagagccagagaagtgtcagggaagctacaggttacaacggatttgtgaactcagccaagcacagtggtggcagggcctagctgctacaaagaagacatattttagacaaatactcatgtgtatgggcaaaaaactgaggactgtatttgtgactaactgtacaacaggttattttagtttctgttctgtggaaagtgtaaagcattccaacaaagggttttaatacagatttttttttttggcacccatgctgttgattgctaaatgtaatagtctgattgtgatactgaataaatgtctttttttttt

SEQ ID NO: 7681 - DNA, 1404 bp, Homo Sapiens
  XR_018614
atgtccatcaatgatccatttagaatatctgatagctggggatgtggcgcgccgcgcggagaacagagctttagcccgcagaacgcccatatgtatgccacccgcctcatccaaatgagatcctacctggagaaccgggcccagcagcactggggcagtggagcggtagtgaagaagctgcgcgagctgcagcccggggagaagcgctgtgtggtgggcactttgttcaagtccatgccgctgcagccctccatcctgcaggagatcagtgaggagcacaacctgctcccgcagcctgctcggagcaaatacatccacccagatgacgtgctggtcttggaagatgaactgcagcgtatgaaactaaaaggcaccattgacgtgtcaaagttggttacagggatcatcctggccgtgtttggctccgtgagggacgacgggaagtttctggtggaagaccactgctttgctgacctcacaccaacaagcccgcacccctgcttgacacagataggttcctgctgctggtgtctggcctgggcctggggggaggtggaggcgagagcctgctgggcacccagctgctggtgggcgtggtgacggggcagcttagggacgaaggggagcagttcagcgcggcccatgtctcccgagttgtccttgaaggcaacctcctcagccacagcacccagagcagagattctatcaataaggccaagtacctcaccaagaaaacccaggcagccagcgtggaggccgtgaagatgctggatgagatcctcctgcagctgagctcctcagtgcccgtggacgtgatgccaggcgagtttgatcccaccaactacacactcccccagcagcccctccacccctgcatgttcctgctggccactgcctaactccacactccagctagtcatcaaaccttaccaggccaccattgatggagtcagattcctggagacatcaggacagaacatgagtgacattttccgatacagcagcatggaggatcacttggagatcctggagtggacactgcgggtccgtcacatcagtcccacaacccctgacaccctaggttgttaccccttctgcaaaaccgacccattcttcttcccggagtgcccgcatgtctacttttgtggcagcatccccagctttggctgttggtgaccatccctgacttaagtgccatgcagaccgcctgcctcgtgaacctgcccagcctggcctgccagcccatcagcttctcaggcttcggggcagaggacgatgatctgggaggcctgggcctgggcctctgactcaaaaaggtggttttgaccagagaggcccagatggaggctgttcattccctgcagtgtcggcattgtaaataaagcctgagcacttgctgatgcg

SEQ ID NO: 7682 - DNA, 373 bp, Homo Sapiens
  XR_018645
cgccgccgccgccgcagacgccgcggcgatgcgctacgtcgcctcctacctgctggctgccctcgggggtaactcctcccccagcgccaaggacatcaagaagatcttggacagcgtgggcatcgaggaggattacgaccggctcaacaaggttatcagtgagctgaatggagaaaacaatgaagacgtcattgcctagagtattggcaagcttgccagtgtacctgccggtgtggctgtggccatctctgttgccccaggctctgcagcccctgctgctggttccgcccctgctgcagcagaggagaagaaagatgagaaggaggagtctgaggagtcggacgatgacatgggatttggcctctttgattaa

SEQ ID NO: 7683 - DNA, 2439 bp, Homo Sapiens
  XR_018707
atgacgctgtgtgacactcagcagcggtgggaaggtgaagcactgcggtccgaagtcaacattcttcaaaaaggccacgtgaaaagatattctcaagaagcccgtataaactcgattcctatacagagagttgtgtatcaggttctctgccacctggagaaggtgtttgattgttcagttctgtcagtcctgttcagcaggattaacctgaaggagtatcccgatttaattgagattcataaaagcttcaaaaaggcgatcagcagtgaagactctgattcctgtgagggcaaagagcccctggaagcctccatctcagcatcaatgcccaggcctgaaaagaaaaacccgggaggaggcaggaaccagagcacgagcagtagctgggtgggcactgtggctgagatcaccaccatcgaggcagtgaagtgcaagatccaggttctgcagcagcaggcagatgatgcagaggagcgagctgagcacctccagcgagaagttgagggagaaaggcaggcccgggaagaggctgaggctgaggtggcctccttgaaccgtaggatccagctggttgaagaagagctggaccatgctcaggagtacctggccactgccttgcaaaagctggaagaagcggaaaaagctgctgatgagagtgagagaggtatgaaggttgttgaaaatcgggccttaaaagatgaagaaaagatggaactccaggaaatctaactccaagaagctaagcacattgcagaagaggcagataggaagtatgaagaggtggctcataagttggtgatcattgaaggagacttggaaggcacggaggaacgagctgagctgggagagtcccgttgccaagagatggatgagcagattagactgatggaccagaacctgaagtgtctgagtgctgctgaagaaatgtactctcaaaaagaagacaaatatgaggaagagatcaagattcttactgataaactcaaggaggcagagaccagtgctgagtttgctgagagatcggtagccaagctggaaaagacaattgatgacttggaagataaactgaaacgcaccaaagaggagcacctctgtacacaaaggatgctggaccagactctgattgacctgaatgagatgtagaacgccccagtcccaccctgctgctgctcctccctctgacccagactccgcctgaggccagcctcctggaagctgaccttaaactgagggctgatctttaactggaaggctgctttctccttttgccgccccctccttccctgtgtctttttcaccaaactgtctctgcctcttctcagagaatccagctgggctagaggctgagcacctttggaaacaacatttaagggaatgtgagcacaatgcataatgtctttaaaaagcatgttgtgatgtacacattttgttattaccttttttgttgttttgtagcaaccatttgtaaaacattccaaataattccacagccctgaagcagcaatcgaatccctttctcacttttggaaggtgacttttcaccttaatgcatattcccctctccatagaggagaggaaaaggtataggcctgccttactgagagccaaacagagcccaggagactccactatgggaaacctcattgctctgtacaaagtactagctaaaccagaaaggtgattccaggaggagctagccaaacaacaacaaaaacaagaaatgttctgttcaagttttcagctttaagatatctttggataatgttatttctattttttatttttttcattagaagtgaccaaattaagatggtaagacctctgagaccaaaattttgtcccatctctaccccctcccacctgcttacagaatggatcatgtcccccttatgttgaggtgaccacttaattgctttcctgcctccttgaaagaaacaaagatcgtgtttttgccactgatttagccatgtgaaactcatctcattacccttttctgggtttgaagctgctgtctctagaagtgccatctcattgtgctttgtatcagtcagtgctggagaaatcttgaatagcttatgtacaaaactttttaaattttatattattttgaaactttgcttctttgggtttgtggcaccctggccaccccatgtggctctaacagcctctgcagtccgtgggctggcagtttgttgatcttttaaagtttctttccctacctagtccccattttctggtaaggtttctaggaggtctgttaggtgtacatcctgcagcttattggcttaaaatgtactctccttttatgtggtctctttggggccgattgggagaaagagaaatcaatagtgcaactgttttgatactgaatattgacaagtgtctttttgaaataaagaaccagtccctccaaaaaaaaaaaaaaagaaaaagaaaaga

SEQ ID NO: 7684 - DNA, 821 bp, Homo Sapiens
  XR_018793
atggactttggtggggctggtgcctcccagctgccaatctggaggcgttcccacagctgggcagaattttgcgccgcgcgctgctgttgctgctgctgctccccaggatgttgccccctacaaatacgcctcctgtgtccgcagccctcatcctgccatacagcctcagccggcgccccagcctgcggtccgtgtgcaggggcgggagccactcactgcctccatgttggctgcagcacccccgcacggaacagaagcagatgctgggagaacgcgtgttcccactcatccaaacaatgcattcaaacctggctgggaagatcacgggaatgctgctggagatcgacaactctgagctgctgcacgtgttagagtcccccgagtctctccgctccaaggtggatgaagctgtagcagttctacaggctcatcatgccaagaaagaagctgcccagaaggtgggcgctgttgctgctgctaccactcagacaaggaaaaaccgattcaaaagccaaataacccctcatggaattcagctcaaggcttgaagtcttcctagcttgtcctatggacctcaacaccaagaactacaaattgcaaatttaataggtcattttgtatcaaaaggtcaattgtgaagcgcctagaatttttcaatgatacgaatatgttctctgggttctgctgtggcccagacagtgttaacttttttttttctattgtgggttttgattttttccccccagaaattggtttcatttgattacccaagtcttacgtttctcaataaagaaaaaaaatctccattaaaaaaaaaaaaa

SEQ ID NO: 7685 - DNA, 3102 bp, Homo Sapiens
  XR_018848
atgactagcaagaagagtattccttcagttggatatgaagtgtttgaaaggagatatgatcaacgctctaagaatggaaacaggcaggtgagggaggcggcggccagcgacgcggttcacctcctgctgtcctcgccctcgccccggcgagctgcccccgacgcgagatgtcttatttaccaacaaatccaccagggagcattcttatttgctggctcggcgtctctctcagcagtcaccggagtgccggagggggaagcgcgatttacggaagactattacccagaagaaaagatgtttgtttttcacaagccaaagatgtaccgaagtatagagggctactgtatttgcagagctaagtcctccagttctcgattcactgacagtaaacgctatgaaaaggacttccagagctgttttggattgcatgagactcgttcaggagacatctgcaatgcctgtgtcctgcttgtgaaaagatggaagaagttgccagcaggatcaaaaaaaaaaactggaatcatgtggtagatgcaagggctggacccagtctaaagactacattgaaaccaaagaaagtgaaaactctatctgggaacaggataaaaagcaaccagatcagtaaactgcagaaggaatttaaacgtcataattctgatgctcacaataccacctcaagtgcctccccagctccatctcctcgttacagtaaccagtcagatgacggctcagatacagagatggcttctggttctaacagaacaccagttttttcctttttagatctcacatactggaaaagacagaagatatgttgtgggatcaactataaaggccgttttggggaagtcctcattgacacacatcccttcaagccttgctgcagcaataagaaagcagctgccgagaagccagaggagcaggggccagagcctctgcccatctccactcaggagtggtgactgaggtttttatgtagaaggggaacaaaaaaaatctgaattttgaaaagaccacaaagcagcaaactgaccctctttttttttttttttttttgagacggagttttgctcttgttacccaggcaggagtgcagtggcgtgatcttggctcactgcaacttccgtctcccgggttcaagtgattctcctgccttagcctcccaagtagctgggtttatatgtgcccgccaccagacccggctaatattttagttttagtagagacggggtttcaccacattggccaggctggtctcaaatgaccctcttatttttaacttggatacctgctattctgccaaaagacaatttctacagtagttttgaatgggttgatatcccctagtcccacaaactctgaagccagtgtccagcttactaaaaaaagagtggtacataatatttaagatgctgagtatttcataggaaagatgaatgctgctgtaaagtactctttaagtcttttttttttttaatccccttctaatgaatgaaactaggggaatttcaggggacagagatgggatttgttgtatgataaactgtatgtagtttttagtctttctgtattgagaagcagtggttggggcatttttaagatggctggctacttgttttccctcatgataataaatttgtcataactcagtaacatgaacttgcccctagaggtagttgttaatgattttgaaatattaaggtcttgccaagcttgtgatgattcaaacctgtactactgattattaagcaggacagactgagctttctgttgcaaataccttggaggagaaagtaacttctaaatatacagagaggtaacttgactatatatgttgcatcctgtgcctcccttcatattaatatttgataaagattttaatttttgtaaaacttctaaagcagaatcaaagctcctcttggggaaatggcaagtctttaggacaggcgagaccctgtatgaatagtaccaaagcattaccgcatggtagagaacacactcgattaaaaatgttaagctatctgaaaaataaaatgtacaagtcctcaggatggcacaaaacaaaggttaatgcttcttggggcacatttcttagagggcttgctgagtgtgtaaatataatcgacttttgtttgtgttctgtgacttcattgaaaatctttacaattcagtttcagctctggattacttcagttgacctttgtgaaggtttttatctgtgtagaatgggtgtttgacttgttttagcctattaagtttttattttctttcactctgtattaaaagtaaaacttactaaaagaaaagaggtttgtgttcacattaaatggttttggtttggcttcttttagtcaggctttctgaacattgagatatcctgaacttagagctcttcaatcctaagattttcatgaaaagcctctcacttgaacctaaaccagagtactcttactgcctcttttctaaatgttcaggaaaagcatcgccagttcggtcttttcagaatgagggagaaacatttgcctgccttgtaataacaagactcagtgctcattttttaaactgcattttaaaaattggatagtataataacaataaggagtaagccaccttttataggcaccctgtagttttatagttcttaatctaaacattttatatttccttcttttggaaaaaacctacatgctacaagccaccatatgcacagactatacagcgagttgagttggcttctcccacagtctttgaggcgaattacaaaagtccagccattatcatcctcctgagttattttgaaatgatttttttgtacattttggctgcagtattggtggtagaatatactataatatggatcatctctacttctgtatttatttatttattactagacctcaaccacagtcttctttttccccttccacctctctttgcctgtaggatgtactgtatgtagtcatgcactttgtattaatatattagaaatctacagatctgttttgtactttttatactgttggatacttataatcaaaacttttactagggtattgaataaatctagtcttattagaaaataaaaaaaaagaaagaaaggaa

SEQ ID NO: 7686 - DNA, 3442 bp, Homo Sapiens
  XR_018889
atgggtgaacaggctgtattagggccaaaatcaaatgctgattcagactttagacaaagggccctggcctattttgagcggttaaagatttccccagatacctggcaggtgtgtgcagaggctgtagcccagaggacatatagtgatgaacatgtaaagtttttctgctttcaagtgctggaacattaagttaaatacaaatactcagaactaaccacggttcaacaacaactaattagggagacgcgcatatcatggctgcaagctcagatgctgaatccccaaccagagaagacctttatacgaaataaagccgcccaagtcttcgccttgctttttgttacagaatatctcactaagtggcccaagtattttgtttacattctctcagtagtggacctaaatccaaggggagtagatgtgtgcctgcgaatcctcatggctatcgattcagagttggtggatcgtgatgtggtgcatacgtcagaggaggctcgtaggaatactctcattaaagataccatgagggaacagtgcattccaaatctggtggaatgatggtaccaaatattacaaaattatcagtatactaattctgaagtgaccagtcagtgctttgaagtagttggggcttacgtctcttggatagacttaccccttatagccaatgataggtttataagtgtgctgctaggtcatatgtcaataggagttctacgggaagaagcatgtgactgtttatttgaagttgtaaataaaggaatggaccctgtcgataaaatgaaactagtagaatctttgtgccaaggattacagtctgctgggtctttcagcattgaccaggaagaagatgttgacttcctggccagattttctaagctggtaaatggaatgggacagtaattgattgatagttggagtaaattaattaagaatgcggatattaagaatgctcaagaggcactacaagctattgaaacaaaagtggcactgatgttgcagctactaattcatgaggaagatgatatttctcctaatattataggattttgttattattatcttcatatttggaaacagcttacagtgctcttggatcagcaaaaagctaatgtagaggcaatcatgttggccgttatgaaaaaattgacttacgatgaagaatataacttcgaaaatgagggtgaagatgaagccatgtttgtagaatatagaaaacaactgaagttactgttggacaggcttgctcaagtttcaccagagttactggtggcctctgttcacagcgtttttagttctacactgcaggattggcagactacatggtttatggaagttgaagtagcaataagattgctgtatatggccgggcgcgctcttctagtatctcacggtgttccatttgcaggtgatgtttcaaaagccagtgctttgcaggatatgatgagaattctggtaacatcaagagtcagttcctatcagcatacatctgtgacgttggagttcttcaaaaatgttgttagatatgaaaagtttttcacagttgaacctcagcacattccgcgtgtactaatggctttcttagatcacagaagtctgcggcattccagtgcaaaagttcggagcaggatggcttacctgttttctagatttgtcaaatctctcaataagcaaatgaatcctctcactgaggatattttgaatagaatacaagatttattagagctttctccacctgagaatggccaccagtctttactgggcagcgatgatcaactttttatttatgagacagctggagtgctgactgttaatagtgaatacctggcagaaaggaaacaagccttggtgaggaatctgttgactccactaatggagaagtttaaaattctgttagaatagttgatgctggcacaagatgaagataggcaagcctctctagcagactgtctcaaccatgctgttggatttgcaagtccaaccagtaaagctttcagcaacaagcagactataaaacaatgtggctgttctgaagtttgtctggactgtttacagacattcctgccagccctcagttgtcccttacaaaaggatattctcagaagtggagtccgtactttccttcatcgaatggttatttgcctgggggaagaagtttttccgttcatcccagctgcttcagaacgtatgctcaaagattgtgaagcagaagacctccaggagttcattcttcttatcaaccagattacggccaaattcaagagacaggtatctccgtttttacaacagatgttcatgcccctgcttcatgcaatttttgaagtgctgctccagccagcggaagaaaatgactagtctgctgctttagagaagcagatgttgtggaggagttactttgctttcctgcaaacagtcacaggcagtgggatgagtgaagttatagcaaatcaagctgcacaaaatagtagagtgctggttactgttacccaaggagcagttgaatatccagatccaattgcacagaaaacatgttttatcatcctctcaaagttggtggaactctggagaggtaaagatggaccagtgggatttgctgattttgtttataagcacattgtcccctcatgtttcctagcacctttaaaacaaacctttgacctggcagatgcacaaacagtattggctttatctgagtgtgcagtgacactgaaaacaattcatctcaaatggggcccagaatgtgttcagtatcttcaacaagaatacctgccctccttgcaagtagctccagaaataattcaggagttttgtcaagcgcttcagcagcctgatgctaaagttttaaaaaattacttaaaggtgttcttccagagagcaaagccctattgactggatttccctgtgcctacttcatgatcaggaattccagttaatttataaagaagcgatttgtgtgtgccattcacactggtctttttcacattgttttgagcttattgcagtatatgttttgggatttttatgtgaaatgggtgtaattttcctaatacaggtatgtaacaacaaaagatgttgcctgcatgccggtccaaattgttctgtataaagatgctcttaaaagacacagagttatcctagaaccttaattcttttttatttgaagttttaagtcaagtcctttataaagactatagcagtagaaaacagtacactttttaaaaaattgctgaatataaaatgtttgaaaattttctttatgtgtgaagacacataaagtatggggggaatacaacaatcaaaactaactttttgtagatagccatttcatttctttaaactgtttcaatgccaatatgtattctacaaaagagaatggttttaggctccagtgttatactttttaaaatatatatatataaataaattttacatagtgaaatct

SEQ ID NO: 7687 - DNA, 893 bp, Homo Sapiens
  XR_018917
aaaaaaactctctcctcccgcagcccaagatgctgaaaggaaagaaggccaagggaaagaaggtggctccggcccctgctgtcgtgaagaagcaggaggctaagaaagtggtgaatcccctgtttgaggaaaggcctaagaattttggcattggacaggacatccagcccaaaagagacctcacccgctttgtgaaatggccccgctatatcaggttgcagcagcagagagccatcctctataagcggctgaaagtgcctcctgcgattaaccagttcacccaggccctggaccgccaaacagctactcagctgcttaagctggcccacaagtacagaccagagacaaagcaagagaagaaggctgttggcccaggccgagaagaaagctgctggcaaaggggacgtccccaccaagagaccacctgtcctttgagcaggagttaacaccgtcaccaccttggtggagaacaagaaagctcagctggtggtgattgcacccgacgtggatcccatcgagctggctgtcttcttgcctgccctatgtcgtaaaatggtggtcccttagtgcattatcaagaggaaggcaagactgggacgtctcgtccacaggaagacctgcaccactgtcgccttcacacaggtgaactcggaagacaaaggcgctttggctaagctggtggaagctatcaggaccaattacaatgacagatacgatgagatctgccgtcactggggtggcaacatcctgggtcctaagtctgtggctcgcattgccaagctcgaaaaggcaaaggctaaagaacttgccactaaactgggttaaatgtgcactgttgagttttctgtacataaaaataattaaaataatacaaattttccttcaaagaaata

SEQ ID NO: 7688 - DNA, 1753 bp, Homo Sapiens
  XR_018923
tttttttttttctgcccatggacaccgccgaagaagcattgttaaagtctctcttcaccctgccgtcatgtctaagtcagagtctcctgaagagcccgaacagctgaggaagctcttcattggagggctgagctttgaaacaaccgatgagagccttgaggagccattttgagcaatggggaatgctcacggactgtgtggtcatgagagatccaaacaccaagcaccccaggggctttgggtttgtcacatatgctactgtggaggaggtggatgcagccatgaatgcaaggccacacaaggtggatggaagagttgtggaaccaaagagagctgtctcgagagaagattctgaaagaccaggtgcccacttaactgtgaaaaagatatttgttggtggcattaaagaagacactgaagaacatcacctaagagatgattttgaacagtatggaaaaattgaagtgattgaaatcatgactgaccgaggcagtggcaagaaaaggggctttgcctttgtaaattttgacgaccatgactccatggataagattgtcattcagaaataccatactgtgaatggccacaactgtgaagttaggaaagccccgtcacagcaagagatggatagtgcttcatccagccaaagaggtcgaagtggttctggaaactttggtggtggtcgtggaggtggtttcggtgggaatgacaactttggtcatggaggaaacttcagtggttgtggtggctttggtggcagtcatggtggtggtggatatggtggcagtggggatggctataatggatttggtaatgatggaagcgattttggaggtggtggaagctacaatgattttggcaattacaacaatcagtcttcaaattttggacccatgaagggaggaaattttggaggcagaagctctggcccttatggtggtggaggccaatactttgcaaaaccacaaaaccaaggtggctatggcggttccagtagcagcggtagctatggcagtggcagaagattttaattaggaaacaaagcttagcaggagcggagagccagagaagtgacagggaagctacaggttacaacagatttgtgaactcagccaagcacagtggtggcagggcctagctgctacaaagaagacatgttttagacaaatactcatgtgtatgggcaaaaaactcgaggactgtatttgtgactaattgtataacaggttattttagtttctgttctgtggaaagtgtaaagcattccaacaaagggttttaatgtagattttttttttgcacctatgctgttgattgctaatgtaatagtctgatcgtgatgctgaataaatgtcttttctttttaatgtgctgtgtaaagttagtctactctgaagccatcttggtaaatttccccaacagtgtgaagttagaattccttcagggtgatgccaggttctatttggaatttatatacaacctgcttggagggagaagccattgtcttcagaaaccttggtgtagttgaactgatagttaccgttgtgacctgaagttcaccattaaaagggattacccaagcaaaatcatggaattattggttataaaagtgattgttggcacatcctatgcaatatatctaaattgaataatggtactagataaaattatagatgggaatgaagcttgtgtatcatccattatcatgtgtaatcaataaatgatttaattctcttgaaaaaaacaaggaagg

SEQ ID NO: 7689 - DNA, 2393 bp, Homo Sapiens
  XR_019071
atgtggagtagggcggagcgcggaacgcgaggagctgctggggtgtgtgtcgcagcgggttttcctcggcggtttgcggagctgctaggatggagcaggctgcggagggagcgagtgtgaccgcagcccctgtgacagctgccgacagcactgaggagttggccgaagtcgaagaaggagttggagtagtgggcggggataatgacgcagccgcgagaggagcggagggctttggcgacagtgaggaggacggagaggatgtgttcgaggtggagaagatcctggacataaagatcgaggggggtgaaattctttacaaagttcgctggaaaggctatacatcggatgacgatacctgggagcccgagactcacctggaggactgtaaagaagtgcttcttgaatttaggaagaaaattgcagagaacaaagccaaagcagtcaggaaggatattcagagactatccttaaataacgacatatttgaggcgaactctgatagcggtcagcaaagtaagacaaaagaagatactttcccaaagaagaaaaagaaaaaattaaggcagagagaggagaaaagcccagatgatctgaaaaagaaaaaagcaaaggccgggaagctaaaagacaagtccaaaacagacctggagagctccttggaaagtttagtttgatttaaggacaaagaaaagaatttctgaagccaaagaagaactaaaggagtccaaaaagcccaaaaaagatgaagtaaaagaaacaaaggaattaaagttaaaaagggtgaaataagagatttaaagacgaaaacaagagaagatcccaaagaaaatagaaaaacaaaaaaagaaaatttgtcgaatcccaggtggaatctgaatcaagtgtacttaatgattccccctttccggaggatgacaatgaagggctacattccgacagcagagaagagaaacaaaacactaaaagtgcaagagagagagcagggcaggacacagggctggagcatggctttgagaagcccctagacagtgccatgagtgctgaggaggataccgatgtcagaggcaggaggaaaaagaagaccccgagaaaggttgaggacactagagagagcaggaagctagagaacaagaacgcattcttagagaagaaaactgtgcctaaaaagcagaggaatcaagacagaggcaaaagtgctgcagagttagagaagcttatgcctatatctgtccaaacgccaaagggctggaggttgagcggggaagagagaggcctctggtccatggactcagccgaggaggtaagggccacgggaggcagcagaaaacccgtgttgagtggccaagacatttcacaagcaaggaaagggaaacagtcaagctatgagaaagtgtttatgaccatgggcggtcataaatgaagatcctccagctcttggacactgcagcttatctcttagtctctggtttgtttctcttagaatgattttgactagaaaattataggctaatttgtgagcaaaaatcaggatggtttttagaggtactcagatgatatatggagcattgtatactcaggtttatagcttcatcagcttattttattagcttttcacatcctgcttggtcatttcccctgttgtcttgagtataccactattaaataataggacacaaactacattaaccagtattttaatgcttataaaaatgtatttaatagagaatttgtcccattataaaaattatttttatatggctttgcaaaatggatatattttccaaattatgagagtatttatatatgcaatatttatcaagggctataaaaaacatcatttttttcatccattatttccagttttgggaatttattttaaggaaatcattttaaagaaggaaaagctgtgcatacatagttatttatggcagtattatcttcattagtgctacagcaaaatagaacaacttagaaaatgcagtggagaagaaaaaccctacataaatgtgaacacagtcatgtaaaaatatgtgtgtaatgtaagcaaaaatgaattttaaaaaagattatgcatgtaaaagtacaaggaccagaagggggaacatggagaagtaaaatagtcatgattggttaagactatgggtggaaaactttcttagaattttctttttttttttttataataataaaattcctaaaagagggttggaaaactggtgttgggttttgaatttgatattttgtgaattattatatggttgactgaggaagcaaaattcttttgtgtgaagaggatttaatgatcattgatcatgtaccacagtatacaagggtgattccctgaagccacaaacctgtattttccggttttcaaataaatatacagtgtcaaa

SEQ ID NO: 7690 - DNA, 1593 bp, Homo Sapiens
  XR_019423
tctgctggccactccgccggtgctgtgcctgggcgcctccgtgctctcggccaactgcctctgagagcgcccacttgagcgccctgggagccggagggcggcggtcctcaccgggaccctcctgtgggcggagggggacaaaagtgtctctcaatccagcacatgcacattgaagcaagttaaaggatttaatatgaagcacagaagccgacagtgccaaacagcaagcagtagttggtacacatttggtgagtggggcagcatttccttctcccactgctgctgagatggcagaaattagtcgaattcgtacgaaatggaatatactgaaggcattagtcagcgaatgagggtcccagaaaagttaaaagtagcaccgccaaacgccaacctggaacagggattccaaaaaggagttccaaatgctagcgtgataataatgcaagttccagagaggattgttgtagcaggaaataatgaggatgtttcattttcaagaccagcagatcttgaccttattcagtcaactccctttaaactcctcgcactaaaaacagcacctcgtgtacttaggctaagtgaaagaccactagattttctggatttagaaagacctcctacaacccctcaaaatgaagaaatccgtgcagttggccgactaaaaagagagcggtctacgagtgaaactgctgttcgccaaaatggacagctggtcagaaatgattctctttatggcatttcaaatacagatacaacaattgaaggaacatcagatgacctgactgttgtagatgcagcttcactaagacgacagataatcaaactaaatagacgtctacaacttccggacgaggagaacaaagaacgtgctaaaagagaaatggtcgtgtattcaattactgtagctttctggctgcttaatagctggctctggttttgccgctagaggtaacatcagctctcaaaaatattatctcaacagctggaaatataaaagatttgcaaacttctttgtttctgtctcttcattgtacgccattttatagtccacaacctgaaaatatatttcttccagaaactctggaggtaacacctgcttaaaattctccttttgcatgttttgtaaataggctccagttttgttttttaaaaggaattcatcttttgcctcatcggtccacacaactgattctgaatgggagagagtctgtagagaattgatttagaaaaatgtctgtgaaagaaaaacaattattttgtcgtgtttctcaaacactgtaagcagttttgttaatagacatttttccatcaacacttcaacattaacactttcaaagtcatggtctgttgccagatttgagaaactcgaaccacctaatatttcataaccttcttcattaggtacttgtacagattaatttctaacatttcagcagtttaatatgtgtgcaataagtgcattctttcattttagttttgtacttggttttctataaagtacgtttttactcagttcatgtgtgaacaatttttaaaaactacagaataaggtacaaatgtagtgtatttaataaactgtcaaccaaagcaaaa

SEQ ID NO: 7691 - DNA, 1206 bp, Homo Sapiens
  XR_019572
agtgcgcgcgggcgcgtgcgggagggggcgggtggggaaggatcgcaggcgagattacgaggcaggcgaggctcgcgcgcccgcccccgccctggcccccagtgcccacccggtcggcccggcacagccatgatcaaggcgatcctaatcttcaacaaccacgggaagccgcggctctccaagttctaccagccctacagtgaagatacacaacagcaaatcatcagggagactttccatttggtatctgagatgaaaatgtttgtaatttcctagaaggaggattattaattggaggatctgacaacaaactgatttatagacattatgcaacgttatattttgtcttctgtgtggattcttcagaaagtgaacttggcattttagatctaattcaagtatttgtggaaacattagacaaatgttttgaaaatgtctgtgagctggatttgattttccatgtagacaaggttcacaatattcttgcagaaatggtgatggggggaatggtattggagacaaatatgaatgagattgttacacaaattgatgcacaaaataagctggaaaaatctgaggctggcttagcaggagctctagcccgtgctgtatcagctgtaaagaatatgaatcttcctgagatcccaagaaatattaacattggtgacatcagtataaaagtgccaaacctgccctcttttaaataaaaatgtaaaaaggccactcccaggtaaaatccagggggaagagtcatctaagtttaccatgcagttgtttaccaaaaatagagaaggagagtcttaacttttgctcttggatttaagtcaaggtactgtatagaagttgtgtaaaatcagtatgaaagttcaatgttgctgttcttgctcagtgattttaaagaaattgagtagttcctatgtgatttttttttcttttctaaactgcattcctgtgcccacctacggcatgcctctatgtattggctactacagtgttttaaaaagtgtttcagatatttctctaattatgtacaacctaaaatgttggtgttttgtatggatcacaagtgcagcattccttaattccttctgctatatgtcacacaattgttatttaaagaaccaagtatgtattgcatgaaaacattatgacctttttctcttatttaaataaactccaaggtaactggacttctaaaaaaaaaaa

SEQ ID NO: 7692 - DNA, 1229 bp, Homo Sapiens
  XR_019580
cccatgtatccattttatttatgtgtgtacactcttccctgtcccctggaggtggccattatctttcactaattcttcctttgattttatataaatttgtataatacatatatgtatccataaacaatgtatgacttggttttgcatggttttttgcactttatataaataaaattacgcttttccgcactacctacagaggtgtccatacagcgttgttctggattcccgtcgtaacttaaagggaaactttcgcaatgtctggagcccctgatgtcctgcaaatgaaggaggaggatgtccttcagttccttgcagcaggaacccacttaggtggcaccaaacttgacttccagatggaacagtacatctataaaaggaaaagtgatggcatctacatcataaatctgaagaggacctgggagaagcttccgttggcagctcgtgccattgttgccattgaaaaccctggtgatgtcagtgttatatcctcctggaatactggccagagggccatgctgaagtttgctgctgccactggagccactccaattgctgaccgctttactcctggaaccttcactaactagatccaggcagccttcccggagccaccgcttcttgtgcttactgaacccagggctgaccaccagcctctcacggaggcatcttatgttaacctacctaccattgctctgtgtaacacagattctcctctgtgctgtgtggacattgccatcccatgcaacaacaagggagctcactcagtgggtttgatgtggtagatgccggctcgggaagttttgcgcatgcgtgacaccatttcccatgaacacccctgggaggtcatgcctcagctctgcttctacagagatcctgaagagattgaaaaagaagagcaggctgctgctgaaaaggcagtgaccaaggaggaatttcagggtgaatggactgctccagctcctgagttcactgctactcagcctgaggttacagactggtctgaaggtgtgcaggtgccctctgtgcctattcagcagttccctactgaagactggagcactcaccctgccacggaagactggtctgcagctcccactgctcaggccactgaatgggtaggagcaaccactgaatggtcttaagctgtccctgcatgggctcttaagcaacatggaaaaatggttgatggaaaataaacatcagtttctcaaataaataaataaata

SEQ ID NO: 7693 - DNA, 582 bp, Homo Sapiens
  XR_019588
atgggagctgacatctgccacaacaaggaccgaaaggttcggcgcaaggagcccaagagccaggatatctacctgaggctgttggtcaagctgtgcagttttctggccagacgaaccgactccacattcaaccaggttgtgctgaagaggttgtttatgagtcgtaccaaccggccacctctgtccctttcccagatgatccagaagagtgaagcttcctgtccgggaaaacaaaacggccgtgattgtggggagcataacagatgacgtgcgggttcaggaggtgcccaaactgaaggtgtgtgtgctgagtgtgaccaacctggcccgcagccgcgtcctcagggcagggggcaagatcctcacttttcgaccagctggccgtggactcccgcaagggctgcagcaccgtcctgctctccggtcctctcaagggccgaaaggtgtacgggcattttggcaaggccccgggaaccccgcacagccacaccaaaccctacgtccactccaagggccggaagttcgagcgcgccagaggctgacgggccagctgaggctacaaaaactaaccctggatcctac

SEQ ID NO: 7694 - DNA, 740 bp, Homo Sapiens
  XR_019590
gtcgacaggcttgaaaatcttgaaaccccagatcaccttaaactctctgggcctgcagaagaggcccactcctccttcacctgaagacaatacaggcgcttctacctcataggatacacaggtcccatcagtatttatcacctcttggccaccggactagtaaccaggatcaagggaaggaagcccaaggaaagcttccacagtgctcgtaatgtcctacattttcacctagtgtgtggtcacatggggggttcccttctaaaaatgtattgagctgaggagaatgcatcaagcccaggcggtggtggaaaggctggaggacacacctcaacatgtggaatcccaatgccggccagccaggaccaaatccatatccccccaccatagggtaccctggaggttccaatcctgcccacccaccacctatcaatccaccctttccccaaggcccctttcttcctctcccagggcaatccagctttccccccaggtgggccccctcatcctgtgccacagccagggtatccaggatgccaatcctcgggtccctaccctcctccatacccaccacctgcccctggatgcctcctgtgaatcccttggctcctggcatgttcggactaggagtgatagaggacaagaagatgcagatgaaaatgaagaaagctcacaaaaagatgcacaagcaccacgagcatggcaagcattcctcctcctcttccatcagtgactctgactga

SEQ ID NO: 7695 - DNA, 7796 bp, Homo Sapiens
  NM_203330
ggggccggggggcggagccttgcgggctggagcgaaagaatgcgggggctgagcgcagaagcggctcgaggctggaagaggatcttgggcgccgccagtctctctctgttgcccaagctggagtgcagtggcacagtcttggctcactgcaacctccacctcctgggtgcaagcgattctcgtgtctcagcctctcaagtagctgggattacagtctttagcaccagttggtgtaggagttgagacctacttcacagtagttctgtggacaatcacaatgggaatccaaggagggtctgtcctgttcgggctgctgctcgtcctggctgtcttctgccattcaggtcatagcctgcagtgctacaactgtcctaacccaactgctgactgcaaaacagccgtcaattgttcatctgattttgatgcgtgtctcattaccaaagctgggttacaagtgtataacaagtgttggaagtttgagcattgcaatttcaacgacgtcacaacccgcttgagggaaaatgagctaacgtactactgctgcaagaaggacctgtgtaactttaacgaacagcttgaaaatggtgggacatccttatcagagaaaacagttcttctgctggtgactccatttctggcagcagcctggagccttcatccctaagtcaacaccaggagagcttctcccaaactccccgttcctgcgtagtccgctttctcttgctgccacattctaaaggcttgatattttccaaatggatcctgttgggaaagaataaaattagcttgagcaacctggctaagatagaggggctctgggagactttgaagaccagtcctgtttgcagggaagccccacttgaaggaagaagtctaagagtgaagtaggtgtgacttgaactagattgcatgcttcctcctttgctcttgggaagaccagctttgcagtgacagcttgagtgggttctctgcagccctcagattatttttcctctggctccttggatgtagtcagttagcatcattagtacatctttggagggtggggcaggagtatatgagcatcctctctcacatggaacgctttcataaacttcagggatcccgtgttgccatggaggcatgccaaatgttccatatgtgggtgtcagtcagggacaacaagatccttaatgcagagctagaggacttctggcagggaagtggggaagtgttccagatagcagggcatgaaaacttagagaggtacaagtggctgaaaatcgagtttttcctctgtctttaaattttatatgggctttgttatcttccactggaaaagtgtaatagcatacatcaatggtgtgttaaagctatttccttgccttttttttattggaatggtaggatatcttggctttgccacacacagttacagagtgaacactctactacatgtgactggcagtattaagtgtgcttattttaaatgttactggtagaaaggcagttcaggtatgtgtgtatatagtatgaatgcagtggggacaccctttgtggttacagtttgagacttccaaaggtcatccttaataacaacagatctgcaggggtatgttttaccatctgcatccagcctcctgctaactcctagctgactcagcatagattgtataaaatacctttgtaacggctcttagcacactcacagatgtttgaggctttcagaagctcttctaaaaaatgatacacacctttcacaagggcaaactttttccttttccctgtgtattctagtgaatgaatctcaagattcagtagacctaatgacatttgtattttatgatcttggctgtatttaatggcataggctgacttttgcagatggaggaatttcttgattaatgttgaaaaaaaacccttgattatactctgttggacaaaccgagtgcaatgaatgatgcttttctgaaaatgaaatataacaagtgggtgaatgtggttatggccgaaaaggatatgcagtatgcttaatggtagcaactgaaagaagacatcctgagcagtgccagctttcttctgttgatgccgttccctgaacataggaaaatagaaacttgcttatcaaaacttagcattaccttggtgctctgtgttctctgttagctcagtgtctttccttacatcaataggtttttttttttttttttggcctgaggaagtactgaccatgcccacagccaccggctgagcaaagaagctcatttcatgtgagttctaaggaatgagaaacaattttgatgaatttaagcagaaaatgaatttctgggaacttttttgggggcgggggggtggggaattcagccacactccagaaagccaggagtcgacagttttggaagcctctctcaggattgagattctaggatgagattggcttactgctatcttgtgtcatgtacccactttttggccagactacactgggaagaaggtagtcctctaaagcaaaatctgagtgccactaaatggggagatggggctgttaagctgtccaaatcaacaagggtcatataaatggccttaaactttggggttgctttctgcaaaaagttgctgtgactcatgccatagacaaggttgagtgcctggacccaaaggcaatactgtaatgtaaagacatttatagtactaggcaaacagcaccccaggtactccaggccctcctggctggagagggctgtggcaatagaaaattagtgccaactgcagtgagtcagcctaggttaaatagagagtgtaagagtgctggacaggaacctccaccctcatgtcacatttcttcaatgtgacccttctggcccctctcctcctgacagcggaacaatgactgccccgataggtgaggctggaggaagaatcagtcctgtccttggcaagctcttcactatgacagtaaaggctctctgcctgctgccaaggcctgtgactttctaacctggcctcacgctgggtaagcttaaggtagaggtgcaggattagcaagcccacctggctaccaggccgacagctacatcctccaactgaccctgatcaacgaagagggattcatgtgtctgtctcagttggttccaaatgaaaccagggagcaggggagttaggaatcgaacaccagtcatgcctactggctctctgctcgagagccaataccctgtgccctccactcatctggatttacaggaactgtcatagtgttcagtattgggtggtgataagcccattggattgtccccttggggggatgagctaggggtgcaaggaacacctgatgagtagataagtggagctcatggtatttcctgaaagatgctaatctatttgccaaacttggtcttgaatgtactgggggcttcaaggtatgggtatatttttcttgtgtccttgcagttagcccccatgtcttatgtgtgtcctgaaaaaataagagcctgcccaagactttgggcctcttgacagaattaaccacttttatacatctgagttctcttggtaagttctttagcagtgttcaaagtctactagctcgcattagtttctgttgctgccaacagatctgaactaatgctaacagatccccctgagggattcttgatgggctgagcagctggctggagctagtactgactgacattcattgtgatgagggcagctttctggtacaggattctaagctctatgttttatatacattttcatctgtacttgcacctcactttacacaagaggaaactatgcaaagttagctggatcgctcaaggtcacttaggtaagttggcaagtccatgcttcccactcagctcctcaggtcagcaagtctacttctctgcctattttgtatactctctttaatatgtgcctagctttggaaagtctagaatgggtccctggtgcctttttactttgaagaaatcagtttctgcctctttttggaaaagaaaacaaagtgcaattgttttttactggaaagttacccaatagcatgaggtgaacaggacgtagttaggccttcctgtaaacagaaaatcatatcaaaacactatcttcccatctgtttctcaatgcctgctacttcttgtagatatttcatttcaggagagcagcagttaaacccgtggattttgtagttaggaacctgggttcaaaccctcttccactaattggctatgtctctggacaagtttttttttttttttttttttaaaccctttctgaactttcactttctatgtctacctcaaagaattgttgtgaggcttgagataatgcatttgtaaagggtctgccagataggaagatgctagttatggatttacaaggttgttaaggctgtaagagtctaaaacctacagtgaatcacaatgcatttacccccactgacttggacataagtgaaaactagccagaagtctctttttcaaattacttacaggttattcaatataaaatttttgtaatggataatcttatttatctaaactaaagcttcctgtttatacacactcctgttattctgggataagataaatgaccacagtaccttaatttctaggtgggtgcctgtgatggttcattgtaggtaaggacattttctctttttcagcagctgtgtaggtccagagcctctgggagaggaggggggtagcatgcacccagcaggggactgaactgggaaactcaaggttctttttactgtggggtagtgagctgcctttctgtgatcggtttccctagggatgttgctgttcccctccttgctattcgcagctacatacaacgtggccaaccccagtaggctgatcctatatatgatcagtgctggtgctgactctcaatagccccacccaagctggctataggtttacagatacattaattaggcaacctaaaatattgatgctggtgttggtgtgacataatgctatggccagaactgaaacttagagttataattcatgtattagggttctccagagggacagaattagtaggatatatgtatatatgaaagggaggttattagggagaactggctcccacagttagaaggcgaagtcgcacaataggccgtctgcaagctgggttagagagaagccagtagtggctcagcctgagttcaaaaacctcaaaactggggaagctgacagtgcagccagccttcagtctgtggccaaaggcccaagagcccctggcaaccaacccactggtgcaagtcctagattccaaaggctgaagaacctggagtctgatgtccaagagcaggaagagtggaagaaagccagaagactcagcaaacaaggtagacagtgtctaccaccatagtggccataccaaagaggctaccgattccttcctgctacctggatccctgaagttgccctggtctctgcaccttctaaacctagttcttaagagctttccattacatgagctgtctcaaagccctccaataaattctcagtgtaagcttctgttgcttgtggacagaaaattctgacagacctaccctataagtgttactgtcaggataacatgagaacgcacaacagtaagtggtcactaagtgttagctacggttattttgcccaaggtagcatggctagttgatgccggttgatggggcttaaacccagctccctcatcttccaggcctctgtactccctattccactaaactacctctcaggtttatttttttaaattcttactctgcaagtacataggaccacatttacctgggaaaacaagaataaaggctgctctgcattttttagaaacttttttgaaagggagatgggaatgcctgcacccccaagtccagaccaacacaatggttaattgagatgaataataaaggaaagactgttctgggcttcccagaatagcttggtccttaaattgtggcacaaacaacctcctgtcagagccagcctcctgccaggaagaggggtaggagactagaggccgtgtgtgcagccttgccctgaaggctagggtgacaatttggaggctgtccaaacaccctggcctctagagctggcctgtctatttgaaatgccggctctgatgctaatcggcgaccctcaggcaagttacttaaccttacatgcctcagttttctcatctggaaaatgagaaccctaggtttagggttgttagaaaagttaaatgagttaagacaagtgcctgggacacagtagcctcttgtgtgtgtttatcattatgtcctcagcaggtcgtagaagcagcttctcaggtgtgaggctggcgcgattatctggagtgggttgggttttctaggatggaccccctgctgcattttcctcattcatccaccagggcttaatggggaatcaaggaatccatgtgtaactgtataataactgtagccacactccaatgaccacctactagttgtccctggcactgcttatacatatgtccatcaaatcaatcctatgaagtagatactgtcttcattttatagatcagagacaattggggttcagagagctgatgtgattttcccagggtcacagagagtcccagattcaggcacaactcttgtattccaagacacaaccactacatgtccaaaggctgcccagagccaccgggcacggcaaattgtgacatatccctaaagaggctgagcacctggtcaggatctgatggctgacagtgtgtccagatgcagagctggagtgggggaggggaaggggggctccttgggacagagaaggctttctgtgctttctctgaagggagcagtctgaggaccaagggaacccggcaaacagcacctcaggtactccaggccctcctggctggagagggctgtggcaatggaaaattagtgccaactgcaatgagtcagcctcggttaaatagagagtgaagaatgctggacaggaacctccaccctcatgtcacatttcttcagtgtgacccttctggcccctctcctcctgacagcggaacaatgactgccccgataggtgaggctggaggaagaatcagtcctgtccttggcaagctcttcactatgacagtaaaggctctctgcctgctgccaaggcctgtgactttctaacctggcctcacgctgggtaagcttaaggtagaggtgcaggattagcaagcccacctggctaccaggccgacagctacatctttcaactgaccctgatcaacgaagagggacttgtgtctctcagttggttccaaatgaaaccagggagcaggggcgttaggaagctccaacaggatggtacttaatggggcatttgagtggagaggtaggtgacatagtgctttggagcccagggagggaaaggttctgctgaagttgaattcaagactgttctttcatcacaaacttgagtttcctggacatttgtttgcagaaacaaccgtagggttttgccttaacctcgtgggtttattattacctcatagggactttgcctcctgacagcagtttatgggtgttcattgtggcacttgagttttcttgcatacttgttagagaaaccaagtttgtcatcaacttcttatttaaccccctggctataacttcatggattatgttataattaagccatccagagtaaaatctgtttagattatcttggagtaagggggaaaaaatctgtaattttttctcctcaactagatatatacataaaaaatgattgtattgcttcatttaaaaaatataacgcaaaatctcttttccttctaaaaaaaaaaaaaaaaaa

SEQ ID NO: 7696 - DNA, 7751 bp, Homo Sapiens
  NM_203329
ggggccggggggcggagccttgcgggctggagcgaaagaatgcgggggctgagcgcagaagcggctcgaggctggaagaggatcttgggcgccgccagtctctctctgttgcccaagctggagtgcagtggcacagtcttggctcactgcaacctccacctcctgggtgcaagcgattctcgtgtctcagcctctcaagtagctgggattacaggttctgtggacaatcacaatgggaatccaaggagggtctgtcctgttcgggctgctgctcgtcctggctgtcttctgccattcaggtcatagcctgcagtgctacaactgtcctaacccaactgctgactgcaaaacagccgtcaattgttcatctgattttgatgcgtgtctcattaccaaagctgggttacaagtgtataacaagtgttggaagtttgagcattgcaatttcaacgacgtcacaacccgcttgagggaaaatgagctaacgtactactgctgcaagaaggacctgtgtaactttaacgaacagcttgaaaatggtgggacatccttatcagagaaaacagttcttctgctggtgactccatttctggcagcagcctggagccttcatccctaagtcaacaccaggagagcttctcccaaactccccgttcctgcgtagtccgctttctcttgctgccacattctaaaggcttgatattttccaaatggatcctgttgggaaagaataaaattagcttgagcaacctggctaagatagaggggctctgggagactttgaagaccagtcctgtttgcagggaagccccacttgaaggaagaagtctaagagtgaagtaggtgtgacttgaactagattgcatgcttcctcctttgctcttgggaagaccagctttgcagtgacagcttgagtgggttctctgcagccctcagattatttttcctctggctccttggatgtagtcagttagcatcattagtacatctttggagggtggggcaggagtatatgagcatcctctctcacatggaacgctttcataaacttcagggatcccgtgttgccatggaggcatgccaaatgttccatatgtgggtgtcagtcagggacaacaagatccttaatgcagagctagaggacttctggcagggaagtggggaagtgttccagatagcagggcatgaaaacttagagaggtacaagtggctgaaaatcgagtttttcctctgtctttaaattttatatgggctttgttatcttccactggaaaagtgtaatagcatacatcaatggtgtgttaaagctatttccttgccttttttttattggaatggtaggatatcttggctttgccacacacagttacagagtgaacactctactacatgtgactggcagtattaagtgtgcttattttaaatgttactggtagaaaggcagttcaggtatgtgtgtatatagtatgaatgcagtggggacaccctttgtggttacagtttgagacttccaaaggtcatccttaataacaacagatctgcaggggtatgttttaccatctgcatccagcctcctgctaactcctagctgactcagcatagattgtataaaatacctttgtaacggctcttagcacactcacagatgtttgaggctttcagaagctcttctaaaaaatgatacacacctttcacaagggcaaactttttccttttccctgtgtattctagtgaatgaatctcaagattcagtagacctaatgacatttgtattttatgatcttggctgtatttaatggcataggctgacttttgcagatggaggaatttcttgattaatgttgaaaaaaaacccttgattatactctgttggacaaaccgagtgcaatgaatgatgcttttctgaaaatgaaatataacaagtgggtgaatgtggttatggccgaaaaggatatgcagtatgcttaatggtagcaactgaaagaagacatcctgagcagtgccagctttcttctgttgatgccgttccctgaacataggaaaatagaaacttgcttatcaaaacttagcattaccttggtgctctgtgttctctgttagctcagtgtctttccttacatcaataggtttttttttttttttttggcctgaggaagtactgaccatgcccacagccaccggctgagcaaagaagctcatttcatgtgagttctaaggaatgagaaacaattttgatgaatttaagcagaaaatgaatttctgggaacttttttgggggcgggggggtggggaattcagccacactccagaaagccaggagtcgacagttttggaagcctctctcaggattgagattctaggatgagattggcttactgctatcttgtgtcatgtacccactttttggccagactacactgggaagaaggtagtcctctaaagcaaaatctgagtgccactaaatggggagatggggctgttaagctgtccaaatcaacaagggtcatataaatggccttaaactttggggttgctttctgcaaaaagttgctgtgactcatgccatagacaaggttgagtgcctggacccaaaggcaatactgtaatgtaaagacatttatagtactaggcaaacagcaccccaggtactccaggccctcctggctggagagggctgtggcaatagaaaattagtgccaactgcagtgagtcagcctaggttaaatagagagtgtaagagtgctggacaggaacctccaccctcatgtcacatttcttcaatgtgacccttctggcccctctcctcctgacagcggaacaatgactgccccgataggtgaggctggaggaagaatcagtcctgtccttggcaagctcttcactatgacagtaaaggctctctgcctgctgccaaggcctgtgactttctaacctggcctcacgctgggtaagcttaaggtagaggtgcaggattagcaagcccacctggctaccaggccgacagctacatcctccaactgaccctgatcaacgaagagggattcatgtgtctgtctcagttggttccaaatgaaaccagggagcaggggagttaggaatcgaacaccagtcatgcctactggctctctgctcgagagccaataccctgtgccctccactcatctggatttacaggaactgtcatagtgttcagtattgggtggtgataagcccattggattgtccccttggggggatgagctaggggtgcaaggaacacctgatgagtagataagtggagctcatggtatttcctgaaagatgctaatctatttgccaaacttggtcttgaatgtactgggggcttcaaggtatgggtatatttttcttgtgtccttgcagttagcccccatgtcttatgtgtgtcctgaaaaaataagagcctgcccaagactttgggcctcttgacagaattaaccacttttatacatctgagttctcttggtaagttctttagcagtgttcaaagtctactagctcgcattagtttctgttgctgccaacagatctgaactaatgctaacagatccccctgagggattcttgatgggctgagcagctggctggagctagtactgactgacattcattgtgatgagggcagctttctggtacaggattctaagctctatgttttatatacattttcatctgtacttgcacctcactttacacaagaggaaactatgcaaagttagctggatcgctcaaggtcacttaggtaagttggcaagtccatgcttcccactcagctcctcaggtcagcaagtctacttctctgcctattttgtatactctctttaatatgtgcctagctttggaaagtctagaatgggtccctggtgcctttttactttgaagaaatcagtttctgcctctttttggaaaagaaaacaaagtgcaattgttttttactggaaagttacccaatagcatgaggtgaacaggacgtagttaggccttcctgtaaacagaaaatcatatcaaaacactatcttcccatctgtttctcaatgcctgctacttcttgtagatatttcatttcaggagagcagcagttaaacccgtggattttgtagttaggaacctgggttcaaaccctcttccactaattggctatgtctctggacaagtttttttttttttttttttttaaaccctttctgaactttcactttctatgtctacctcaaagaattgttgtgaggcttgagataatgcatttgtaaagggtctgccagataggaagatgctagttatggatttacaaggttgttaaggctgtaagagtctaaaacctacagtgaatcacaatgcatttacccccactgacttggacataagtgaaaactagccagaagtctctttttcaaattacttacaggttattcaatataaaatttttgtaatggataatcttatttatctaaactaaagcttcctgtttatacacactcctgttattctgggataagataaatgaccacagtaccttaatttctaggtgggtgcctgtgatggttcattgtaggtaaggacattttctctttttcagcagctgtgtaggtccagagcctctgggagaggaggggggtagcatgcacccagcaggggactgaactgggaaactcaaggttctttttactgtggggtagtgagctgcctttctgtgatcggtttccctagggatgttgctgttcccctccttgctattcgcagctacatacaacgtggccaaccccagtaggctgatcctatatatgatcagtgctggtgctgactctcaatagccccacccaagctggctataggtttacagatacattaattaggcaacctaaaatattgatgctggtgttggtgtgacataatgctatggccagaactgaaacttagagttataattcatgtattagggttctccagagggacagaattagtaggatatatgtatatatgaaagggaggttattagggagaactggctcccacagttagaaggcgaagtcgcacaataggccgtctgcaagctgggttagagagaagccagtagtggctcagcctgagttcaaaaacctcaaaactggggaagctgacagtgcagccagccttcagtctgtggccaaaggcccaagagcccctggcaaccaacccactggtgcaagtcctagattccaaaggctgaagaacctggagtctgatgtccaagagcaggaagagtggaagaaagccagaagactcagcaaacaaggtagacagtgtctaccaccatagtggccataccaaagaggctaccgattccttcctgctacctggatccctgaagttgccctggtctctgcaccttctaaacctagttcttaagagctttccattacatgagctgtctcaaagccctccaataaattctcagtgtaagcttctgttgcttgtggacagaaaattctgacagacctaccctataagtgttactgtcaggataacatgagaacgcacaacagtaagtggtcactaagtgttagctacggttattttgcccaaggtagcatggctagttgatgccggttgatggggcttaaacccagctccctcatcttccaggcctctgtactccctattccactaaactacctctcaggtttatttttttaaattcttactctgcaagtacataggaccacatttacctgggaaaacaagaataaaggctgctctgcattttttagaaacttttttgaaagggagatgggaatgcctgcacccccaagtccagaccaacacaatggttaattgagatgaataataaaggaaagactgttctgggcttcccagaatagcttggtccttaaattgtggcacaaacaacctcctgtcagagccagcctcctgccaggaagaggggtaggagactagaggccgtgtgtgcagccttgccctgaaggctagggtgacaatttggaggctgtccaaacaccctggcctctagagctggcctgtctatttgaaatgccggctctgatgctaatcggcgaccctcaggcaagttacttaaccttacatgcctcagttttctcatctggaaaatgagaaccctaggtttagggttgttagaaaagttaaatgagttaagacaagtgcctgggacacagtagcctcttgtgtgtgtttatcattatgtcctcagcaggtcgtagaagcagcttctcaggtgtgaggctggcgcgattatctggagtgggttgggttttctaggatggaccccctgctgcattttcctcattcatccaccagggcttaatggggaatcaaggaatccatgtgtaactgtataataactgtagccacactccaatgaccacctactagttgtccctggcactgcttatacatatgtccatcaaatcaatcctatgaagtagatactgtcttcattttatagatcagagacaattggggttcagagagctgatgtgattttcccagggtcacagagagtcccagattcaggcacaactcttgtattccaagacacaaccactacatgtccaaaggctgcccagagccaccgggcacggcaaattgtgacatatccctaaagaggctgagcacctggtcaggatctgatggctgacagtgtgtccagatgcagagctggagtgggggaggggaaggggggctccttgggacagagaaggctttctgtgctttctctgaagggagcagtctgaggaccaagggaacccggcaaacagcacctcaggtactccaggccctcctggctggagagggctgtggcaatggaaaattagtgccaactgcaatgagtcagcctcggttaaatagagagtgaagaatgctggacaggaacctccaccctcatgtcacatttcttcagtgtgacccttctggcccctctcctcctgacagcggaacaatgactgccccgataggtgaggctggaggaagaatcagtcctgtccttggcaagctcttcactatgacagtaaaggctctctgcctgctgccaaggcctgtgactttctaacctggcctcacgctgggtaagcttaaggtagaggtgcaggattagcaagcccacctggctaccaggccgacagctacatctttcaactgaccctgatcaacgaagagggacttgtgtctctcagttggttccaaatgaaaccagggagcaggggcgttaggaagctccaacaggatggtacttaatggggcatttgagtggagaggtaggtgacatagtgctttggagcccagggagggaaaggttctgctgaagttgaattcaagactgttctttcatcacaaacttgagtttcctggacatttgtttgcagaaacaaccgtagggttttgccttaacctcgtgggtttattattacctcatagggactttgcctcctgacagcagtttatgggtgttcattgtggcacttgagttttcttgcatacttgttagagaaaccaagtttgtcatcaacttcttatttaaccccctggctataacttcatggattatgttataattaagccatccagagtaaaatctgtttagattatcttggagtaagggggaaaaaatctgtaattttttctcctcaactagatatatacataaaaaatgattgtattgcttcatttaaaaaatataacgcaaaatctcttttccttctaaaaaaaaaaaaaaaaaa

SEQ ID NO: 7697 - DNA, 7680 bp, Homo Sapiens
  NM_203331
ggggccggggggcggagccttgcgggctggagcgaaagaatgcgggggctgagcgcagaagcggctcgaggctggaagaggatcttgggcgccgccagtctttagcaccagttggtgtaggagttgagacctacttcacagtagttctgtggacaatcacaatgggaatccaaggagggtctgtcctgttcgggctgctgctcgtcctggctgtcttctgccattcaggtcatagcctgcagtgctacaactgtcctaacccaactgctgactgcaaaacagccgtcaattgttcatctgattttgatgcgtgtctcattaccaaagctgggttacaagtgtataacaagtgttggaagtttgagcattgcaatttcaacgacgtcacaacccgcttgagggaaaatgagctaacgtactactgctgcaagaaggacctgtgtaactttaacgaacagcttgaaaatggtgggacatccttatcagagaaaacagttcttctgctggtgactccatttctggcagcagcctggagccttcatccctaagtcaacaccaggagagcttctcccaaactccccgttcctgcgtagtccgctttctcttgctgccacattctaaaggcttgatattttccaaatggatcctgttgggaaagaataaaattagcttgagcaacctggctaagatagaggggctctgggagactttgaagaccagtcctgtttgcagggaagccccacttgaaggaagaagtctaagagtgaagtaggtgtgacttgaactagattgcatgcttcctcctttgctcttgggaagaccagctttgcagtgacagcttgagtgggttctctgcagccctcagattatttttcctctggctccttggatgtagtcagttagcatcattagtacatctttggagggtggggcaggagtatatgagcatcctctctcacatggaacgctttcataaacttcagggatcccgtgttgccatggaggcatgccaaatgttccatatgtgggtgtcagtcagggacaacaagatccttaatgcagagctagaggacttctggcagggaagtggggaagtgttccagatagcagggcatgaaaacttagagaggtacaagtggctgaaaatcgagtttttcctctgtctttaaattttatatgggctttgttatcttccactggaaaagtgtaatagcatacatcaatggtgtgttaaagctatttccttgccttttttttattggaatggtaggatatcttggctttgccacacacagttacagagtgaacactctactacatgtgactggcagtattaagtgtgcttattttaaatgttactggtagaaaggcagttcaggtatgtgtgtatatagtatgaatgcagtggggacaccctttgtggttacagtttgagacttccaaaggtcatccttaataacaacagatctgcaggggtatgttttaccatctgcatccagcctcctgctaactcctagctgactcagcatagattgtataaaatacctttgtaacggctcttagcacactcacagatgtttgaggctttcagaagctcttctaaaaaatgatacacacctttcacaagggcaaactttttccttttccctgtgtattctagtgaatgaatctcaagattcagtagacctaatgacatttgtattttatgatcttggctgtatttaatggcataggctgacttttgcagatggaggaatttcttgattaatgttgaaaaaaaacccttgattatactctgttggacaaaccgagtgcaatgaatgatgcttttctgaaaatgaaatataacaagtgggtgaatgtggttatggccgaaaaggatatgcagtatgcttaatggtagcaactgaaagaagacatcctgagcagtgccagctttcttctgttgatgccgttccctgaacataggaaaatagaaacttgcttatcaaaacttagcattaccttggtgctctgtgttctctgttagctcagtgtctttccttacatcaataggtttttttttttttttttggcctgaggaagtactgaccatgcccacagccaccggctgagcaaagaagctcatttcatgtgagttctaaggaatgagaaacaattttgatgaatttaagcagaaaatgaatttctgggaacttttttgggggcgggggggtggggaattcagccacactccagaaagccaggagtcgacagttttggaagcctctctcaggattgagattctaggatgagattggcttactgctatcttgtgtcatgtacccactttttggccagactacactgggaagaaggtagtcctctaaagcaaaatctgagtgccactaaatggggagatggggctgttaagctgtccaaatcaacaagggtcatataaatggccttaaactttggggttgctttctgcaaaaagttgctgtgactcatgccatagacaaggttgagtgcctggacccaaaggcaatactgtaatgtaaagacatttatagtactaggcaaacagcaccccaggtactccaggccctcctggctggagagggctgtggcaatagaaaattagtgccaactgcagtgagtcagcctaggttaaatagagagtgtaagagtgctggacaggaacctccaccctcatgtcacatttcttcaatgtgacccttctggcccctctcctcctgacagcggaacaatgactgccccgataggtgaggctggaggaagaatcagtcctgtccttggcaagctcttcactatgacagtaaaggctctctgcctgctgccaaggcctgtgactttctaacctggcctcacgctgggtaagcttaaggtagaggtgcaggattagcaagcccacctggctaccaggccgacagctacatcctccaactgaccctgatcaacgaagagggattcatgtgtctgtctcagttggttccaaatgaaaccagggagcaggggagttaggaatcgaacaccagtcatgcctactggctctctgctcgagagccaataccctgtgccctccactcatctggatttacaggaactgtcatagtgttcagtattgggtggtgataagcccattggattgtccccttggggggatgagctaggggtgcaaggaacacctgatgagtagataagtggagctcatggtatttcctgaaagatgctaatctatttgccaaacttggtcttgaatgtactgggggcttcaaggtatgggtatatttttcttgtgtccttgcagttagcccccatgtcttatgtgtgtcctgaaaaaataagagcctgcccaagactttgggcctcttgacagaattaaccacttttatacatctgagttctcttggtaagttctttagcagtgttcaaagtctactagctcgcattagtttctgttgctgccaacagatctgaactaatgctaacagatccccctgagggattcttgatgggctgagcagctggctggagctagtactgactgacattcattgtgatgagggcagctttctggtacaggattctaagctctatgttttatatacattttcatctgtacttgcacctcactttacacaagaggaaactatgcaaagttagctggatcgctcaaggtcacttaggtaagttggcaagtccatgcttcccactcagctcctcaggtcagcaagtctacttctctgcctattttgtatactctctttaatatgtgcctagctttggaaagtctagaatgggtccctggtgcctttttactttgaagaaatcagtttctgcctctttttggaaaagaaaacaaagtgcaattgttttttactggaaagttacccaatagcatgaggtgaacaggacgtagttaggccttcctgtaaacagaaaatcatatcaaaacactatcttcccatctgtttctcaatgcctgctacttcttgtagatatttcatttcaggagagcagcagttaaacccgtggattttgtagttaggaacctgggttcaaaccctcttccactaattggctatgtctctggacaagtttttttttttttttttttttaaaccctttctgaactttcactttctatgtctacctcaaagaattgttgtgaggcttgagataatgcatttgtaaagggtctgccagataggaagatgctagttatggatttacaaggttgttaaggctgtaagagtctaaaacctacagtgaatcacaatgcatttacccccactgacttggacataagtgaaaactagccagaagtctctttttcaaattacttacaggttattcaatataaaatttttgtaatggataatcttatttatctaaactaaagcttcctgtttatacacactcctgttattctgggataagataaatgaccacagtaccttaatttctaggtgggtgcctgtgatggttcattgtaggtaaggacattttctctttttcagcagctgtgtaggtccagagcctctgggagaggaggggggtagcatgcacccagcaggggactgaactgggaaactcaaggttctttttactgtggggtagtgagctgcctttctgtgatcggtttccctagggatgttgctgttcccctccttgctattcgcagctacatacaacgtggccaaccccagtaggctgatcctatatatgatcagtgctggtgctgactctcaatagccccacccaagctggctataggtttacagatacattaattaggcaacctaaaatattgatgctggtgttggtgtgacataatgctatggccagaactgaaacttagagttataattcatgtattagggttctccagagggacagaattagtaggatatatgtatatatgaaagggaggttattagggagaactggctcccacagttagaaggcgaagtcgcacaataggccgtctgcaagctgggttagagagaagccagtagtggctcagcctgagttcaaaaacctcaaaactggggaagctgacagtgcagccagccttcagtctgtggccaaaggcccaagagcccctggcaaccaacccactggtgcaagtcctagattccaaaggctgaagaacctggagtctgatgtccaagagcaggaagagtggaagaaagccagaagactcagcaaacaaggtagacagtgtctaccaccatagtggccataccaaagaggctaccgattccttcctgctacctggatccctgaagttgccctggtctctgcaccttctaaacctagttcttaagagctttccattacatgagctgtctcaaagccctccaataaattctcagtgtaagcttctgttgcttgtggacagaaaattctgacagacctaccctataagtgttactgtcaggataacatgagaacgcacaacagtaagtggtcactaagtgttagctacggttattttgcccaaggtagcatggctagttgatgccggttgatggggcttaaacccagctccctcatcttccaggcctctgtactccctattccactaaactacctctcaggtttatttttttaaattcttactctgcaagtacataggaccacatttacctgggaaaacaagaataaaggctgctctgcattttttagaaacttttttgaaagggagatgggaatgcctgcacccccaagtccagaccaacacaatggttaattgagatgaataataaaggaaagactgttctgggcttcccagaatagcttggtccttaaattgtggcacaaacaacctcctgtcagagccagcctcctgccaggaagaggggtaggagactagaggccgtgtgtgcagccttgccctgaaggctagggtgacaatttggaggctgtccaaacaccctggcctctagagctggcctgtctatttgaaatgccggctctgatgctaatcggcgaccctcaggcaagttacttaaccttacatgcctcagttttctcatctggaaaatgagaaccctaggtttagggttgttagaaaagttaaatgagttaagacaagtgcctgggacacagtagcctcttgtgtgtgtttatcattatgtcctcagcaggtcgtagaagcagcttctcaggtgtgaggctggcgcgattatctggagtgggttgggttttctaggatggaccccctgctgcattttcctcattcatccaccagggcttaatggggaatcaaggaatccatgtgtaactgtataataactgtagccacactccaatgaccacctactagttgtccctggcactgcttatacatatgtccatcaaatcaatcctatgaagtagatactgtcttcattttatagatcagagacaattggggttcagagagctgatgtgattttcccagggtcacagagagtcccagattcaggcacaactcttgtattccaagacacaaccactacatgtccaaaggctgcccagagccaccgggcacggcaaattgtgacatatccctaaagaggctgagcacctggtcaggatctgatggctgacagtgtgtccagatgcagagctggagtgggggaggggaaggggggctccttgggacagagaaggctttctgtgctttctctgaagggagcagtctgaggaccaagggaacccggcaaacagcacctcaggtactccaggccctcctggctggagagggctgtggcaatggaaaattagtgccaactgcaatgagtcagcctcggttaaatagagagtgaagaatgctggacaggaacctccaccctcatgtcacatttcttcagtgtgacccttctggcccctctcctcctgacagcggaacaatgactgccccgataggtgaggctggaggaagaatcagtcctgtccttggcaagctcttcactatgacagtaaaggctctctgcctgctgccaaggcctgtgactttctaacctggcctcacgctgggtaagcttaaggtagaggtgcaggattagcaagcccacctggctaccaggccgacagctacatctttcaactgaccctgatcaacgaagagggacttgtgtctctcagttggttccaaatgaaaccagggagcaggggcgttaggaagctccaacaggatggtacttaatggggcatttgagtggagaggtaggtgacatagtgctttggagcccagggagggaaaggttctgctgaagttgaattcaagactgttctttcatcacaaacttgagtttcctggacatttgtttgcagaaacaaccgtagggttttgccttaacctcgtgggtttattattacctcatagggactttgcctcctgacagcagtttatgggtgttcattgtggcacttgagttttcttgcatacttgttagagaaaccaagtttgtcatcaacttcttatttaaccccctggctataacttcatggattatgttataattaagccatccagagtaaaatctgtttagattatcttggagtaagggggaaaaaatctgtaattttttctcctcaactagatatatacataaaaaatgattgtattgcttcatttaaaaaatataacgcaaaatctcttttccttctaaaaaaaaaaaaaaaaaa

SEQ ID NO: 7698 - DNA, 7801 bp, Homo Sapiens
  NM_001127223
atttgactcactgaccctgatggggaagatagtgttattcccacagtgtggtagtacacactggggcttatagggactgagcctactcaagggtatatggtgctgtgggtcagagctggggcatggcccagggattcagtgtgccttgactccccctgtaaatgttcctctcagaagccttcttggccttccagcccttggtttttgagacaaccagcagtcatttgttcgttcctgacattccttcctgtcccttccttccaggttctgtggacaatcacaatgggaatccaaggagggtctgtcctgttcgggctgctgctcgtcctggctgtcttctgccattcaggtcatagcctgcagtgctacaactgtcctaacccaactgctgactgcaaaacagccgtcaattgttcatctgattttgatgcgtgtctcattaccaaagctgggttacaagtgtataacaagtgttggaagtttgagcattgcaatttcaacgacgtcacaacccgcttgagggaaaatgagctaacgtactactgctgcaagaaggacctgtgtaactttaacgaacagcttgaaaatggtgggacatccttatcagagaaaacagttcttctgctggtgactccatttctggcagcagcctggagccttcatccctaagtcaacaccaggagagcttctcccaaactccccgttcctgcgtagtccgctttctcttgctgccacattctaaaggcttgatattttccaaatggatcctgttgggaaagaataaaattagcttgagcaacctggctaagatagaggggctctgggagactttgaagaccagtcctgtttgcagggaagccccacttgaaggaagaagtctaagagtgaagtaggtgtgacttgaactagattgcatgcttcctcctttgctcttgggaagaccagctttgcagtgacagcttgagtgggttctctgcagccctcagattatttttcctctggctccttggatgtagtcagttagcatcattagtacatctttggagggtggggcaggagtatatgagcatcctctctcacatggaacgctttcataaacttcagggatcccgtgttgccatggaggcatgccaaatgttccatatgtgggtgtcagtcagggacaacaagatccttaatgcagagctagaggacttctggcagggaagtggggaagtgttccagatagcagggcatgaaaacttagagaggtacaagtggctgaaaatcgagtttttcctctgtctttaaattttatatgggctttgttatcttccactggaaaagtgtaatagcatacatcaatggtgtgttaaagctatttccttgccttttttttattggaatggtaggatatcttggctttgccacacacagttacagagtgaacactctactacatgtgactggcagtattaagtgtgcttattttaaatgttactggtagaaaggcagttcaggtatgtgtgtatatagtatgaatgcagtggggacaccctttgtggttacagtttgagacttccaaaggtcatccttaataacaacagatctgcaggggtatgttttaccatctgcatccagcctcctgctaactcctagctgactcagcatagattgtataaaatacctttgtaacggctcttagcacactcacagatgtttgaggctttcagaagctcttctaaaaaatgatacacacctttcacaagggcaaactttttccttttccctgtgtattctagtgaatgaatctcaagattcagtagacctaatgacatttgtattttatgatcttggctgtatttaatggcataggctgacttttgcagatggaggaatttcttgattaatgttgaaaaaaaacccttgattatactctgttggacaaaccgagtgcaatgaatgatgcttttctgaaaatgaaatataacaagtgggtgaatgtggttatggccgaaaaggatatgcagtatgcttaatggtagcaactgaaagaagacatcctgagcagtgccagctttcttctgttgatgccgttccctgaacataggaaaatagaaacttgcttatcaaaacttagcattaccttggtgctctgtgttctctgttagctcagtgtctttccttacatcaataggtttttttttttttttttggcctgaggaagtactgaccatgcccacagccaccggctgagcaaagaagctcatttcatgtgagttctaaggaatgagaaacaattttgatgaatttaagcagaaaatgaatttctgggaacttttttgggggcgggggggtggggaattcagccacactccagaaagccaggagtcgacagttttggaagcctctctcaggattgagattctaggatgagattggcttactgctatcttgtgtcatgtacccactttttggccagactacactgggaagaaggtagtcctctaaagcaaaatctgagtgccactaaatggggagatggggctgttaagctgtccaaatcaacaagggtcatataaatggccttaaactttggggttgctttctgcaaaaagttgctgtgactcatgccatagacaaggttgagtgcctggacccaaaggcaatactgtaatgtaaagacatttatagtactaggcaaacagcaccccaggtactccaggccctcctggctggagagggctgtggcaatagaaaattagtgccaactgcagtgagtcagcctaggttaaatagagagtgtaagagtgctggacaggaacctccaccctcatgtcacatttcttcaatgtgacccttctggcccctctcctcctgacagcggaacaatgactgccccgataggtgaggctggaggaagaatcagtcctgtccttggcaagctcttcactatgacagtaaaggctctctgcctgctgccaaggcctgtgactttctaacctggcctcacgctgggtaagcttaaggtagaggtgcaggattagcaagcccacctggctaccaggccgacagctacatcctccaactgaccctgatcaacgaagagggattcatgtgtctgtctcagttggttccaaatgaaaccagggagcaggggagttaggaatcgaacaccagtcatgcctactggctctctgctcgagagccaataccctgtgccctccactcatctggatttacaggaactgtcatagtgttcagtattgggtggtgataagcccattggattgtccccttggggggatgagctaggggtgcaaggaacacctgatgagtagataagtggagctcatggtatttcctgaaagatgctaatctatttgccaaacttggtcttgaatgtactgggggcttcaaggtatgggtatatttttcttgtgtccttgcagttagcccccatgtcttatgtgtgtcctgaaaaaataagagcctgcccaagactttgggcctcttgacagaattaaccacttttatacatctgagttctcttggtaagttctttagcagtgttcaaagtctactagctcgcattagtttctgttgctgccaacagatctgaactaatgctaacagatccccctgagggattcttgatgggctgagcagctggctggagctagtactgactgacattcattgtgatgagggcagctttctggtacaggattctaagctctatgttttatatacattttcatctgtacttgcacctcactttacacaagaggaaactatgcaaagttagctggatcgctcaaggtcacttaggtaagttggcaagtccatgcttcccactcagctcctcaggtcagcaagtctacttctctgcctattttgtatactctctttaatatgtgcctagctttggaaagtctagaatgggtccctggtgcctttttactttgaagaaatcagtttctgcctctttttggaaaagaaaacaaagtgcaattgttttttactggaaagttacccaatagcatgaggtgaacaggacgtagttaggccttcctgtaaacagaaaatcatatcaaaacactatcttcccatctgtttctcaatgcctgctacttcttgtagatatttcatttcaggagagcagcagttaaacccgtggattttgtagttaggaacctgggttcaaaccctcttccactaattggctatgtctctggacaagtttttttttttttttttttttaaaccctttctgaactttcactttctatgtctacctcaaagaattgttgtgaggcttgagataatgcatttgtaaagggtctgccagataggaagatgctagttatggatttacaaggttgttaaggctgtaagagtctaaaacctacagtgaatcacaatgcatttacccccactgacttggacataagtgaaaactagccagaagtctctttttcaaattacttacaggttattcaatataaaatttttgtaatggataatcttatttatctaaactaaagcttcctgtttatacacactcctgttattctgggataagataaatgaccacagtaccttaatttctaggtgggtgcctgtgatggttcattgtaggtaaggacattttctctttttcagcagctgtgtaggtccagagcctctgggagaggaggggggtagcatgcacccagcaggggactgaactgggaaactcaaggttctttttactgtggggtagtgagctgcctttctgtgatcggtttccctagggatgttgctgttcccctccttgctattcgcagctacatacaacgtggccaaccccagtaggctgatcctatatatgatcagtgctggtgctgactctcaatagccccacccaagctggctataggtttacagatacattaattaggcaacctaaaatattgatgctggtgttggtgtgacataatgctatggccagaactgaaacttagagttataattcatgtattagggttctccagagggacagaattagtaggatatatgtatatatgaaagggaggttattagggagaactggctcccacagttagaaggcgaagtcgcacaataggccgtctgcaagctgggttagagagaagccagtagtggctcagcctgagttcaaaaacctcaaaactggggaagctgacagtgcagccagccttcagtctgtggccaaaggcccaagagcccctggcaaccaacccactggtgcaagtcctagattccaaaggctgaagaacctggagtctgatgtccaagagcaggaagagtggaagaaagccagaagactcagcaaacaaggtagacagtgtctaccaccatagtggccataccaaagaggctaccgattccttcctgctacctggatccctgaagttgccctggtctctgcaccttctaaacctagttcttaagagctttccattacatgagctgtctcaaagccctccaataaattctcagtgtaagcttctgttgcttgtggacagaaaattctgacagacctaccctataagtgttactgtcaggataacatgagaacgcacaacagtaagtggtcactaagtgttagctacggttattttgcccaaggtagcatggctagttgatgccggttgatggggcttaaacccagctccctcatcttccaggcctctgtactccctattccactaaactacctctcaggtttatttttttaaattcttactctgcaagtacataggaccacatttacctgggaaaacaagaataaaggctgctctgcattttttagaaacttttttgaaagggagatgggaatgcctgcacccccaagtccagaccaacacaatggttaattgagatgaataataaaggaaagactgttctgggcttcccagaatagcttggtccttaaattgtggcacaaacaacctcctgtcagagccagcctcctgccaggaagaggggtaggagactagaggccgtgtgtgcagccttgccctgaaggctagggtgacaatttggaggctgtccaaacaccctggcctctagagctggcctgtctatttgaaatgccggctctgatgctaatcggcgaccctcaggcaagttacttaaccttacatgcctcagttttctcatctggaaaatgagaaccctaggtttagggttgttagaaaagttaaatgagttaagacaagtgcctgggacacagtagcctcttgtgtgtgtttatcattatgtcctcagcaggtcgtagaagcagcttctcaggtgtgaggctggcgcgattatctggagtgggttgggttttctaggatggaccccctgctgcattttcctcattcatccaccagggcttaatggggaatcaaggaatccatgtgtaactgtataataactgtagccacactccaatgaccacctactagttgtccctggcactgcttatacatatgtccatcaaatcaatcctatgaagtagatactgtcttcattttatagatcagagacaattggggttcagagagctgatgtgattttcccagggtcacagagagtcccagattcaggcacaactcttgtattccaagacacaaccactacatgtccaaaggctgcccagagccaccgggcacggcaaattgtgacatatccctaaagaggctgagcacctggtcaggatctgatggctgacagtgtgtccagatgcagagctggagtgggggaggggaaggggggctccttgggacagagaaggctttctgtgctttctctgaagggagcagtctgaggaccaagggaacccggcaaacagcacctcaggtactccaggccctcctggctggagagggctgtggcaatggaaaattagtgccaactgcaatgagtcagcctcggttaaatagagagtgaagaatgctggacaggaacctccaccctcatgtcacatttcttcagtgtgacccttctggcccctctcctcctgacagcggaacaatgactgccccgataggtgaggctggaggaagaatcagtcctgtccttggcaagctcttcactatgacagtaaaggctctctgcctgctgccaaggcctgtgactttctaacctggcctcacgctgggtaagcttaaggtagaggtgcaggattagcaagcccacctggctaccaggccgacagctacatctttcaactgaccctgatcaacgaagagggacttgtgtctctcagttggttccaaatgaaaccagggagcaggggcgttaggaagctccaacaggatggtacttaatggggcatttgagtggagaggtaggtgacatagtgctttggagcccagggagggaaaggttctgctgaagttgaattcaagactgttctttcatcacaaacttgagtttcctggacatttgtttgcagaaacaaccgtagggttttgccttaacctcgtgggtttattattacctcatagggactttgcctcctgacagcagtttatgggtgttcattgtggcacttgagttttcttgcatacttgttagagaaaccaagtttgtcatcaacttcttatttaaccccctggctataacttcatggattatgttataattaagccatccagagtaaaatctgtttagattatcttggagtaagggggaaaaaatctgtaattttttctcctcaactagatatatacataaaaaatgattgtattgcttcatttaaaaaatataacgcaaaatctcttttccttctaaaaaaaaaaaaaaaaaa

SEQ ID NO: 7699 - DNA, 7694 bp, Homo Sapiens
  NM_001127225
atttgactcactgaccctgatggggaagatagtgttattcccacagtgtggtagtacacactggggcttatagggactgagcctactcaagggtatatggtgctgtgggtcagagctggggcatggcccagggattcagtgtgccttgactccccctgttctgtggacaatcacaatgggaatccaaggagggtctgtcctgttcgggctgctgctcgtcctggctgtcttctgccattcaggtcatagcctgcagtgctacaactgtcctaacccaactgctgactgcaaaacagccgtcaattgttcatctgattttgatgcgtgtctcattaccaaagctgggttacaagtgtataacaagtgttggaagtttgagcattgcaatttcaacgacgtcacaacccgcttgagggaaaatgagctaacgtactactgctgcaagaaggacctgtgtaactttaacgaacagcttgaaaatggtgggacatccttatcagagaaaacagttcttctgctggtgactccatttctggcagcagcctggagccttcatccctaagtcaacaccaggagagcttctcccaaactccccgttcctgcgtagtccgctttctcttgctgccacattctaaaggcttgatattttccaaatggatcctgttgggaaagaataaaattagcttgagcaacctggctaagatagaggggctctgggagactttgaagaccagtcctgtttgcagggaagccccacttgaaggaagaagtctaagagtgaagtaggtgtgacttgaactagattgcatgcttcctcctttgctcttgggaagaccagctttgcagtgacagcttgagtgggttctctgcagccctcagattatttttcctctggctccttggatgtagtcagttagcatcattagtacatctttggagggtggggcaggagtatatgagcatcctctctcacatggaacgctttcataaacttcagggatcccgtgttgccatggaggcatgccaaatgttccatatgtgggtgtcagtcagggacaacaagatccttaatgcagagctagaggacttctggcagggaagtggggaagtgttccagatagcagggcatgaaaacttagagaggtacaagtggctgaaaatcgagtttttcctctgtctttaaattttatatgggctttgttatcttccactggaaaagtgtaatagcatacatcaatggtgtgttaaagctatttccttgccttttttttattggaatggtaggatatcttggctttgccacacacagttacagagtgaacactctactacatgtgactggcagtattaagtgtgcttattttaaatgttactggtagaaaggcagttcaggtatgtgtgtatatagtatgaatgcagtggggacaccctttgtggttacagtttgagacttccaaaggtcatccttaataacaacagatctgcaggggtatgttttaccatctgcatccagcctcctgctaactcctagctgactcagcatagattgtataaaatacctttgtaacggctcttagcacactcacagatgtttgaggctttcagaagctcttctaaaaaatgatacacacctttcacaagggcaaactttttccttttccctgtgtattctagtgaatgaatctcaagattcagtagacctaatgacatttgtattttatgatcttggctgtatttaatggcataggctgacttttgcagatggaggaatttcttgattaatgttgaaaaaaaacccttgattatactctgttggacaaaccgagtgcaatgaatgatgcttttctgaaaatgaaatataacaagtgggtgaatgtggttatggccgaaaaggatatgcagtatgcttaatggtagcaactgaaagaagacatcctgagcagtgccagctttcttctgttgatgccgttccctgaacataggaaaatagaaacttgcttatcaaaacttagcattaccttggtgctctgtgttctctgttagctcagtgtctttccttacatcaataggtttttttttttttttttggcctgaggaagtactgaccatgcccacagccaccggctgagcaaagaagctcatttcatgtgagttctaaggaatgagaaacaattttgatgaatttaagcagaaaatgaatttctgggaacttttttgggggcgggggggtggggaattcagccacactccagaaagccaggagtcgacagttttggaagcctctctcaggattgagattctaggatgagattggcttactgctatcttgtgtcatgtacccactttttggccagactacactgggaagaaggtagtcctctaaagcaaaatctgagtgccactaaatggggagatggggctgttaagctgtccaaatcaacaagggtcatataaatggccttaaactttggggttgctttctgcaaaaagttgctgtgactcatgccatagacaaggttgagtgcctggacccaaaggcaatactgtaatgtaaagacatttatagtactaggcaaacagcaccccaggtactccaggccctcctggctggagagggctgtggcaatagaaaattagtgccaactgcagtgagtcagcctaggttaaatagagagtgtaagagtgctggacaggaacctccaccctcatgtcacatttcttcaatgtgacccttctggcccctctcctcctgacagcggaacaatgactgccccgataggtgaggctggaggaagaatcagtcctgtccttggcaagctcttcactatgacagtaaaggctctctgcctgctgccaaggcctgtgactttctaacctggcctcacgctgggtaagcttaaggtagaggtgcaggattagcaagcccacctggctaccaggccgacagctacatcctccaactgaccctgatcaacgaagagggattcatgtgtctgtctcagttggttccaaatgaaaccagggagcaggggagttaggaatcgaacaccagtcatgcctactggctctctgctcgagagccaataccctgtgccctccactcatctggatttacaggaactgtcatagtgttcagtattgggtggtgataagcccattggattgtccccttggggggatgagctaggggtgcaaggaacacctgatgagtagataagtggagctcatggtatttcctgaaagatgctaatctatttgccaaacttggtcttgaatgtactgggggcttcaaggtatgggtatatttttcttgtgtccttgcagttagcccccatgtcttatgtgtgtcctgaaaaaataagagcctgcccaagactttgggcctcttgacagaattaaccacttttatacatctgagttctcttggtaagttctttagcagtgttcaaagtctactagctcgcattagtttctgttgctgccaacagatctgaactaatgctaacagatccccctgagggattcttgatgggctgagcagctggctggagctagtactgactgacattcattgtgatgagggcagctttctggtacaggattctaagctctatgttttatatacattttcatctgtacttgcacctcactttacacaagaggaaactatgcaaagttagctggatcgctcaaggtcacttaggtaagttggcaagtccatgcttcccactcagctcctcaggtcagcaagtctacttctctgcctattttgtatactctctttaatatgtgcctagctttggaaagtctagaatgggtccctggtgcctttttactttgaagaaatcagtttctgcctctttttggaaaagaaaacaaagtgcaattgttttttactggaaagttacccaatagcatgaggtgaacaggacgtagttaggccttcctgtaaacagaaaatcatatcaaaacactatcttcccatctgtttctcaatgcctgctacttcttgtagatatttcatttcaggagagcagcagttaaacccgtggattttgtagttaggaacctgggttcaaaccctcttccactaattggctatgtctctggacaagtttttttttttttttttttttaaaccctttctgaactttcactttctatgtctacctcaaagaattgttgtgaggcttgagataatgcatttgtaaagggtctgccagataggaagatgctagttatggatttacaaggttgttaaggctgtaagagtctaaaacctacagtgaatcacaatgcatttacccccactgacttggacataagtgaaaactagccagaagtctctttttcaaattacttacaggttattcaatataaaatttttgtaatggataatcttatttatctaaactaaagcttcctgtttatacacactcctgttattctgggataagataaatgaccacagtaccttaatttctaggtgggtgcctgtgatggttcattgtaggtaaggacattttctctttttcagcagctgtgtaggtccagagcctctgggagaggaggggggtagcatgcacccagcaggggactgaactgggaaactcaaggttctttttactgtggggtagtgagctgcctttctgtgatcggtttccctagggatgttgctgttcccctccttgctattcgcagctacatacaacgtggccaaccccagtaggctgatcctatatatgatcagtgctggtgctgactctcaatagccccacccaagctggctataggtttacagatacattaattaggcaacctaaaatattgatgctggtgttggtgtgacataatgctatggccagaactgaaacttagagttataattcatgtattagggttctccagagggacagaattagtaggatatatgtatatatgaaagggaggttattagggagaactggctcccacagttagaaggcgaagtcgcacaataggccgtctgcaagctgggttagagagaagccagtagtggctcagcctgagttcaaaaacctcaaaactggggaagctgacagtgcagccagccttcagtctgtggccaaaggcccaagagcccctggcaaccaacccactggtgcaagtcctagattccaaaggctgaagaacctggagtctgatgtccaagagcaggaagagtggaagaaagccagaagactcagcaaacaaggtagacagtgtctaccaccatagtggccataccaaagaggctaccgattccttcctgctacctggatccctgaagttgccctggtctctgcaccttctaaacctagttcttaagagctttccattacatgagctgtctcaaagccctccaataaattctcagtgtaagcttctgttgcttgtggacagaaaattctgacagacctaccctataagtgttactgtcaggataacatgagaacgcacaacagtaagtggtcactaagtgttagctacggttattttgcccaaggtagcatggctagttgatgccggttgatggggcttaaacccagctccctcatcttccaggcctctgtactccctattccactaaactacctctcaggtttatttttttaaattcttactctgcaagtacataggaccacatttacctgggaaaacaagaataaaggctgctctgcattttttagaaacttttttgaaagggagatgggaatgcctgcacccccaagtccagaccaacacaatggttaattgagatgaataataaaggaaagactgttctgggcttcccagaatagcttggtccttaaattgtggcacaaacaacctcctgtcagagccagcctcctgccaggaagaggggtaggagactagaggccgtgtgtgcagccttgccctgaaggctagggtgacaatttggaggctgtccaaacaccctggcctctagagctggcctgtctatttgaaatgccggctctgatgctaatcggcgaccctcaggcaagttacttaaccttacatgcctcagttttctcatctggaaaatgagaaccctaggtttagggttgttagaaaagttaaatgagttaagacaagtgcctgggacacagtagcctcttgtgtgtgtttatcattatgtcctcagcaggtcgtagaagcagcttctcaggtgtgaggctggcgcgattatctggagtgggttgggttttctaggatggaccccctgctgcattttcctcattcatccaccagggcttaatggggaatcaaggaatccatgtgtaactgtataataactgtagccacactccaatgaccacctactagttgtccctggcactgcttatacatatgtccatcaaatcaatcctatgaagtagatactgtcttcattttatagatcagagacaattggggttcagagagctgatgtgattttcccagggtcacagagagtcccagattcaggcacaactcttgtattccaagacacaaccactacatgtccaaaggctgcccagagccaccgggcacggcaaattgtgacatatccctaaagaggctgagcacctggtcaggatctgatggctgacagtgtgtccagatgcagagctggagtgggggaggggaaggggggctccttgggacagagaaggctttctgtgctttctctgaagggagcagtctgaggaccaagggaacccggcaaacagcacctcaggtactccaggccctcctggctggagagggctgtggcaatggaaaattagtgccaactgcaatgagtcagcctcggttaaatagagagtgaagaatgctggacaggaacctccaccctcatgtcacatttcttcagtgtgacccttctggcccctctcctcctgacagcggaacaatgactgccccgataggtgaggctggaggaagaatcagtcctgtccttggcaagctcttcactatgacagtaaaggctctctgcctgctgccaaggcctgtgactttctaacctggcctcacgctgggtaagcttaaggtagaggtgcaggattagcaagcccacctggctaccaggccgacagctacatctttcaactgaccctgatcaacgaagagggacttgtgtctctcagttggttccaaatgaaaccagggagcaggggcgttaggaagctccaacaggatggtacttaatggggcatttgagtggagaggtaggtgacatagtgctttggagcccagggagggaaaggttctgctgaagttgaattcaagactgttctttcatcacaaacttgagtttcctggacatttgtttgcagaaacaaccgtagggttttgccttaacctcgtgggtttattattacctcatagggactttgcctcctgacagcagtttatgggtgttcattgtggcacttgagttttcttgcatacttgttagagaaaccaagtttgtcatcaacttcttatttaaccccctggctataacttcatggattatgttataattaagccatccagagtaaaatctgtttagattatcttggagtaagggggaaaaaatctgtaattttttctcctcaactagatatatacataaaaaatgattgtattgcttcatttaaaaaatataacgcaaaatctcttttccttctaaaaaaaaaaaaaaaaaa

SEQ ID NO: 7700 - DNA, 7629 bp, Homo Sapiens
  NM_001127226
atttgactcactgaccctgatggggaagatagtgttattcccacagtgtggtagtacacactggggcttatagggactgagcctactcaagggttctgtggacaatcacaatgggaatccaaggagggtctgtcctgttcgggctgctgctcgtcctggctgtcttctgccattcaggtcatagcctgcagtgctacaactgtcctaacccaactgctgactgcaaaacagccgtcaattgttcatctgattttgatgcgtgtctcattaccaaagctgggttacaagtgtataacaagtgttggaagtttgagcattgcaatttcaacgacgtcacaacccgcttgagggaaaatgagctaacgtactactgctgcaagaaggacctgtgtaactttaacgaacagcttgaaaatggtgggacatccttatcagagaaaacagttcttctgctggtgactccatttctggcagcagcctggagccttcatccctaagtcaacaccaggagagcttctcccaaactccccgttcctgcgtagtccgctttctcttgctgccacattctaaaggcttgatattttccaaatggatcctgttgggaaagaataaaattagcttgagcaacctggctaagatagaggggctctgggagactttgaagaccagtcctgtttgcagggaagccccacttgaaggaagaagtctaagagtgaagtaggtgtgacttgaactagattgcatgcttcctcctttgctcttgggaagaccagctttgcagtgacagcttgagtgggttctctgcagccctcagattatttttcctctggctccttggatgtagtcagttagcatcattagtacatctttggagggtggggcaggagtatatgagcatcctctctcacatggaacgctttcataaacttcagggatcccgtgttgccatggaggcatgccaaatgttccatatgtgggtgtcagtcagggacaacaagatccttaatgcagagctagaggacttctggcagggaagtggggaagtgttccagatagcagggcatgaaaacttagagaggtacaagtggctgaaaatcgagtttttcctctgtctttaaattttatatgggctttgttatcttccactggaaaagtgtaatagcatacatcaatggtgtgttaaagctatttccttgccttttttttattggaatggtaggatatcttggctttgccacacacagttacagagtgaacactctactacatgtgactggcagtattaagtgtgcttattttaaatgttactggtagaaaggcagttcaggtatgtgtgtatatagtatgaatgcagtggggacaccctttgtggttacagtttgagacttccaaaggtcatccttaataacaacagatctgcaggggtatgttttaccatctgcatccagcctcctgctaactcctagctgactcagcatagattgtataaaatacctttgtaacggctcttagcacactcacagatgtttgaggctttcagaagctcttctaaaaaatgatacacacctttcacaagggcaaactttttccttttccctgtgtattctagtgaatgaatctcaagattcagtagacctaatgacatttgtattttatgatcttggctgtatttaatggcataggctgacttttgcagatggaggaatttcttgattaatgttgaaaaaaaacccttgattatactctgttggacaaaccgagtgcaatgaatgatgcttttctgaaaatgaaatataacaagtgggtgaatgtggttatggccgaaaaggatatgcagtatgcttaatggtagcaactgaaagaagacatcctgagcagtgccagctttcttctgttgatgccgttccctgaacataggaaaatagaaacttgcttatcaaaacttagcattaccttggtgctctgtgttctctgttagctcagtgtctttccttacatcaataggtttttttttttttttttggcctgaggaagtactgaccatgcccacagccaccggctgagcaaagaagctcatttcatgtgagttctaaggaatgagaaacaattttgatgaatttaagcagaaaatgaatttctgggaacttttttgggggcgggggggtggggaattcagccacactccagaaagccaggagtcgacagttttggaagcctctctcaggattgagattctaggatgagattggcttactgctatcttgtgtcatgtacccactttttggccagactacactgggaagaaggtagtcctctaaagcaaaatctgagtgccactaaatggggagatggggctgttaagctgtccaaatcaacaagggtcatataaatggccttaaactttggggttgctttctgcaaaaagttgctgtgactcatgccatagacaaggttgagtgcctggacccaaaggcaatactgtaatgtaaagacatttatagtactaggcaaacagcaccccaggtactccaggccctcctggctggagagggctgtggcaatagaaaattagtgccaactgcagtgagtcagcctaggttaaatagagagtgtaagagtgctggacaggaacctccaccctcatgtcacatttcttcaatgtgacccttctggcccctctcctcctgacagcggaacaatgactgccccgataggtgaggctggaggaagaatcagtcctgtccttggcaagctcttcactatgacagtaaaggctctctgcctgctgccaaggcctgtgactttctaacctggcctcacgctgggtaagcttaaggtagaggtgcaggattagcaagcccacctggctaccaggccgacagctacatcctccaactgaccctgatcaacgaagagggattcatgtgtctgtctcagttggttccaaatgaaaccagggagcaggggagttaggaatcgaacaccagtcatgcctactggctctctgctcgagagccaataccctgtgccctccactcatctggatttacaggaactgtcatagtgttcagtattgggtggtgataagcccattggattgtccccttggggggatgagctaggggtgcaaggaacacctgatgagtagataagtggagctcatggtatttcctgaaagatgctaatctatttgccaaacttggtcttgaatgtactgggggcttcaaggtatgggtatatttttcttgtgtccttgcagttagcccccatgtcttatgtgtgtcctgaaaaaataagagcctgcccaagactttgggcctcttgacagaattaaccacttttatacatctgagttctcttggtaagttctttagcagtgttcaaagtctactagctcgcattagtttctgttgctgccaacagatctgaactaatgctaacagatccccctgagggattcttgatgggctgagcagctggctggagctagtactgactgacattcattgtgatgagggcagctttctggtacaggattctaagctctatgttttatatacattttcatctgtacttgcacctcactttacacaagaggaaactatgcaaagttagctggatcgctcaaggtcacttaggtaagttggcaagtccatgcttcccactcagctcctcaggtcagcaagtctacttctctgcctattttgtatactctctttaatatgtgcctagctttggaaagtctagaatgggtccctggtgcctttttactttgaagaaatcagtttctgcctctttttggaaaagaaaacaaagtgcaattgttttttactggaaagttacccaatagcatgaggtgaacaggacgtagttaggccttcctgtaaacagaaaatcatatcaaaacactatcttcccatctgtttctcaatgcctgctacttcttgtagatatttcatttcaggagagcagcagttaaacccgtggattttgtagttaggaacctgggttcaaaccctcttccactaattggctatgtctctggacaagtttttttttttttttttttttaaaccctttctgaactttcactttctatgtctacctcaaagaattgttgtgaggcttgagataatgcatttgtaaagggtctgccagataggaagatgctagttatggatttacaaggttgttaaggctgtaagagtctaaaacctacagtgaatcacaatgcatttacccccactgacttggacataagtgaaaactagccagaagtctctttttcaaattacttacaggttattcaatataaaatttttgtaatggataatcttatttatctaaactaaagcttcctgtttatacacactcctgttattctgggataagataaatgaccacagtaccttaatttctaggtgggtgcctgtgatggttcattgtaggtaaggacattttctctttttcagcagctgtgtaggtccagagcctctgggagaggaggggggtagcatgcacccagcaggggactgaactgggaaactcaaggttctttttactgtggggtagtgagctgcctttctgtgatcggtttccctagggatgttgctgttcccctccttgctattcgcagctacatacaacgtggccaaccccagtaggctgatcctatatatgatcagtgctggtgctgactctcaatagccccacccaagctggctataggtttacagatacattaattaggcaacctaaaatattgatgctggtgttggtgtgacataatgctatggccagaactgaaacttagagttataattcatgtattagggttctccagagggacagaattagtaggatatatgtatatatgaaagggaggttattagggagaactggctcccacagttagaaggcgaagtcgcacaataggccgtctgcaagctgggttagagagaagccagtagtggctcagcctgagttcaaaaacctcaaaactggggaagctgacagtgcagccagccttcagtctgtggccaaaggcccaagagcccctggcaaccaacccactggtgcaagtcctagattccaaaggctgaagaacctggagtctgatgtccaagagcaggaagagtggaagaaagccagaagactcagcaaacaaggtagacagtgtctaccaccatagtggccataccaaagaggctaccgattccttcctgctacctggatccctgaagttgccctggtctctgcaccttctaaacctagttcttaagagctttccattacatgagctgtctcaaagccctccaataaattctcagtgtaagcttctgttgcttgtggacagaaaattctgacagacctaccctataagtgttactgtcaggataacatgagaacgcacaacagtaagtggtcactaagtgttagctacggttattttgcccaaggtagcatggctagttgatgccggttgatggggcttaaacccagctccctcatcttccaggcctctgtactccctattccactaaactacctctcaggtttatttttttaaattcttactctgcaagtacataggaccacatttacctgggaaaacaagaataaaggctgctctgcattttttagaaacttttttgaaagggagatgggaatgcctgcacccccaagtccagaccaacacaatggttaattgagatgaataataaaggaaagactgttctgggcttcccagaatagcttggtccttaaattgtggcacaaacaacctcctgtcagagccagcctcctgccaggaagaggggtaggagactagaggccgtgtgtgcagccttgccctgaaggctagggtgacaatttggaggctgtccaaacaccctggcctctagagctggcctgtctatttgaaatgccggctctgatgctaatcggcgaccctcaggcaagttacttaaccttacatgcctcagttttctcatctggaaaatgagaaccctaggtttagggttgttagaaaagttaaatgagttaagacaagtgcctgggacacagtagcctcttgtgtgtgtttatcattatgtcctcagcaggtcgtagaagcagcttctcaggtgtgaggctggcgcgattatctggagtgggttgggttttctaggatggaccccctgctgcattttcctcattcatccaccagggcttaatggggaatcaaggaatccatgtgtaactgtataataactgtagccacactccaatgaccacctactagttgtccctggcactgcttatacatatgtccatcaaatcaatcctatgaagtagatactgtcttcattttatagatcagagacaattggggttcagagagctgatgtgattttcccagggtcacagagagtcccagattcaggcacaactcttgtattccaagacacaaccactacatgtccaaaggctgcccagagccaccgggcacggcaaattgtgacatatccctaaagaggctgagcacctggtcaggatctgatggctgacagtgtgtccagatgcagagctggagtgggggaggggaaggggggctccttgggacagagaaggctttctgtgctttctctgaagggagcagtctgaggaccaagggaacccggcaaacagcacctcaggtactccaggccctcctggctggagagggctgtggcaatggaaaattagtgccaactgcaatgagtcagcctcggttaaatagagagtgaagaatgctggacaggaacctccaccctcatgtcacatttcttcagtgtgacccttctggcccctctcctcctgacagcggaacaatgactgccccgataggtgaggctggaggaagaatcagtcctgtccttggcaagctcttcactatgacagtaaaggctctctgcctgctgccaaggcctgtgactttctaacctggcctcacgctgggtaagcttaaggtagaggtgcaggattagcaagcccacctggctaccaggccgacagctacatctttcaactgaccctgatcaacgaagagggacttgtgtctctcagttggttccaaatgaaaccagggagcaggggcgttaggaagctccaacaggatggtacttaatggggcatttgagtggagaggtaggtgacatagtgctttggagcccagggagggaaaggttctgctgaagttgaattcaagactgttctttcatcacaaacttgagtttcctggacatttgtttgcagaaacaaccgtagggttttgccttaacctcgtgggtttattattacctcatagggactttgcctcctgacagcagtttatgggtgttcattgtggcacttgagttttcttgcatacttgttagagaaaccaagtttgtcatcaacttcttatttaaccccctggctataacttcatggattatgttataattaagccatccagagtaaaatctgtttagattatcttggagtaagggggaaaaaatctgtaattttttctcctcaactagatatatacataaaaaatgattgtattgcttcatttaaaaaatataacgcaaaatctcttttccttctaaaaaaaaaaaaaaaaaa

SEQ ID NO: 7701 - DNA, 7573 bp, Homo Sapiens
  NM_001127227
attatacttcttacagtgaggagccagagcttccaggttctgtggacaatcacaatgggaatccaaggagggtctgtcctgttcgggctgctgctcgtcctggctgtcttctgccattcaggtcatagcctgcagtgctacaactgtcctaacccaactgctgactgcaaaacagccgtcaattgttcatctgattttgatgcgtgtctcattaccaaagctgggttacaagtgtataacaagtgttggaagtttgagcattgcaatttcaacgacgtcacaacccgcttgagggaaaatgagctaacgtactactgctgcaagaaggacctgtgtaactttaacgaacagcttgaaaatggtgggacatccttatcagagaaaacagttcttctgctggtgactccatttctggcagcagcctggagccttcatccctaagtcaacaccaggagagcttctcccaaactccccgttcctgcgtagtccgctttctcttgctgccacattctaaaggcttgatattttccaaatggatcctgttgggaaagaataaaattagcttgagcaacctggctaagatagaggggctctgggagactttgaagaccagtcctgtttgcagggaagccccacttgaaggaagaagtctaagagtgaagtaggtgtgacttgaactagattgcatgcttcctcctttgctcttgggaagaccagctttgcagtgacagcttgagtgggttctctgcagccctcagattatttttcctctggctccttggatgtagtcagttagcatcattagtacatctttggagggtggggcaggagtatatgagcatcctctctcacatggaacgctttcataaacttcagggatcccgtgttgccatggaggcatgccaaatgttccatatgtgggtgtcagtcagggacaacaagatccttaatgcagagctagaggacttctggcagggaagtggggaagtgttccagatagcagggcatgaaaacttagagaggtacaagtggctgaaaatcgagtttttcctctgtctttaaattttatatgggctttgttatcttccactggaaaagtgtaatagcatacatcaatggtgtgttaaagctatttccttgccttttttttattggaatggtaggatatcttggctttgccacacacagttacagagtgaacactctactacatgtgactggcagtattaagtgtgcttattttaaatgttactggtagaaaggcagttcaggtatgtgtgtatatagtatgaatgcagtggggacaccctttgtggttacagtttgagacttccaaaggtcatccttaataacaacagatctgcaggggtatgttttaccatctgcatccagcctcctgctaactcctagctgactcagcatagattgtataaaatacctttgtaacggctcttagcacactcacagatgtttgaggctttcagaagctcttctaaaaaatgatacacacctttcacaagggcaaactttttccttttccctgtgtattctagtgaatgaatctcaagattcagtagacctaatgacatttgtattttatgatcttggctgtatttaatggcataggctgacttttgcagatggaggaatttcttgattaatgttgaaaaaaaacccttgattatactctgttggacaaaccgagtgcaatgaatgatgcttttctgaaaatgaaatataacaagtgggtgaatgtggttatggccgaaaaggatatgcagtatgcttaatggtagcaactgaaagaagacatcctgagcagtgccagctttcttctgttgatgccgttccctgaacataggaaaatagaaacttgcttatcaaaacttagcattaccttggtgctctgtgttctctgttagctcagtgtctttccttacatcaataggtttttttttttttttttggcctgaggaagtactgaccatgcccacagccaccggctgagcaaagaagctcatttcatgtgagttctaaggaatgagaaacaattttgatgaatttaagcagaaaatgaatttctgggaacttttttgggggcgggggggtggggaattcagccacactccagaaagccaggagtcgacagttttggaagcctctctcaggattgagattctaggatgagattggcttactgctatcttgtgtcatgtacccactttttggccagactacactgggaagaaggtagtcctctaaagcaaaatctgagtgccactaaatggggagatggggctgttaagctgtccaaatcaacaagggtcatataaatggccttaaactttggggttgctttctgcaaaaagttgctgtgactcatgccatagacaaggttgagtgcctggacccaaaggcaatactgtaatgtaaagacatttatagtactaggcaaacagcaccccaggtactccaggccctcctggctggagagggctgtggcaatagaaaattagtgccaactgcagtgagtcagcctaggttaaatagagagtgtaagagtgctggacaggaacctccaccctcatgtcacatttcttcaatgtgacccttctggcccctctcctcctgacagcggaacaatgactgccccgataggtgaggctggaggaagaatcagtcctgtccttggcaagctcttcactatgacagtaaaggctctctgcctgctgccaaggcctgtgactttctaacctggcctcacgctgggtaagcttaaggtagaggtgcaggattagcaagcccacctggctaccaggccgacagctacatcctccaactgaccctgatcaacgaagagggattcatgtgtctgtctcagttggttccaaatgaaaccagggagcaggggagttaggaatcgaacaccagtcatgcctactggctctctgctcgagagccaataccctgtgccctccactcatctggatttacaggaactgtcatagtgttcagtattgggtggtgataagcccattggattgtccccttggggggatgagctaggggtgcaaggaacacctgatgagtagataagtggagctcatggtatttcctgaaagatgctaatctatttgccaaacttggtcttgaatgtactgggggcttcaaggtatgggtatatttttcttgtgtccttgcagttagcccccatgtcttatgtgtgtcctgaaaaaataagagcctgcccaagactttgggcctcttgacagaattaaccacttttatacatctgagttctcttggtaagttctttagcagtgttcaaagtctactagctcgcattagtttctgttgctgccaacagatctgaactaatgctaacagatccccctgagggattcttgatgggctgagcagctggctggagctagtactgactgacattcattgtgatgagggcagctttctggtacaggattctaagctctatgttttatatacattttcatctgtacttgcacctcactttacacaagaggaaactatgcaaagttagctggatcgctcaaggtcacttaggtaagttggcaagtccatgcttcccactcagctcctcaggtcagcaagtctacttctctgcctattttgtatactctctttaatatgtgcctagctttggaaagtctagaatgggtccctggtgcctttttactttgaagaaatcagtttctgcctctttttggaaaagaaaacaaagtgcaattgttttttactggaaagttacccaatagcatgaggtgaacaggacgtagttaggccttcctgtaaacagaaaatcatatcaaaacactatcttcccatctgtttctcaatgcctgctacttcttgtagatatttcatttcaggagagcagcagttaaacccgtggattttgtagttaggaacctgggttcaaaccctcttccactaattggctatgtctctggacaagtttttttttttttttttttttaaaccctttctgaactttcactttctatgtctacctcaaagaattgttgtgaggcttgagataatgcatttgtaaagggtctgccagataggaagatgctagttatggatttacaaggttgttaaggctgtaagagtctaaaacctacagtgaatcacaatgcatttacccccactgacttggacataagtgaaaactagccagaagtctctttttcaaattacttacaggttattcaatataaaatttttgtaatggataatcttatttatctaaactaaagcttcctgtttatacacactcctgttattctgggataagataaatgaccacagtaccttaatttctaggtgggtgcctgtgatggttcattgtaggtaaggacattttctctttttcagcagctgtgtaggtccagagcctctgggagaggaggggggtagcatgcacccagcaggggactgaactgggaaactcaaggttctttttactgtggggtagtgagctgcctttctgtgatcggtttccctagggatgttgctgttcccctccttgctattcgcagctacatacaacgtggccaaccccagtaggctgatcctatatatgatcagtgctggtgctgactctcaatagccccacccaagctggctataggtttacagatacattaattaggcaacctaaaatattgatgctggtgttggtgtgacataatgctatggccagaactgaaacttagagttataattcatgtattagggttctccagagggacagaattagtaggatatatgtatatatgaaagggaggttattagggagaactggctcccacagttagaaggcgaagtcgcacaataggccgtctgcaagctgggttagagagaagccagtagtggctcagcctgagttcaaaaacctcaaaactggggaagctgacagtgcagccagccttcagtctgtggccaaaggcccaagagcccctggcaaccaacccactggtgcaagtcctagattccaaaggctgaagaacctggagtctgatgtccaagagcaggaagagtggaagaaagccagaagactcagcaaacaaggtagacagtgtctaccaccatagtggccataccaaagaggctaccgattccttcctgctacctggatccctgaagttgccctggtctctgcaccttctaaacctagttcttaagagctttccattacatgagctgtctcaaagccctccaataaattctcagtgtaagcttctgttgcttgtggacagaaaattctgacagacctaccctataagtgttactgtcaggataacatgagaacgcacaacagtaagtggtcactaagtgttagctacggttattttgcccaaggtagcatggctagttgatgccggttgatggggcttaaacccagctccctcatcttccaggcctctgtactccctattccactaaactacctctcaggtttatttttttaaattcttactctgcaagtacataggaccacatttacctgggaaaacaagaataaaggctgctctgcattttttagaaacttttttgaaagggagatgggaatgcctgcacccccaagtccagaccaacacaatggttaattgagatgaataataaaggaaagactgttctgggcttcccagaatagcttggtccttaaattgtggcacaaacaacctcctgtcagagccagcctcctgccaggaagaggggtaggagactagaggccgtgtgtgcagccttgccctgaaggctagggtgacaatttggaggctgtccaaacaccctggcctctagagctggcctgtctatttgaaatgccggctctgatgctaatcggcgaccctcaggcaagttacttaaccttacatgcctcagttttctcatctggaaaatgagaaccctaggtttagggttgttagaaaagttaaatgagttaagacaagtgcctgggacacagtagcctcttgtgtgtgtttatcattatgtcctcagcaggtcgtagaagcagcttctcaggtgtgaggctggcgcgattatctggagtgggttgggttttctaggatggaccccctgctgcattttcctcattcatccaccagggcttaatggggaatcaaggaatccatgtgtaactgtataataactgtagccacactccaatgaccacctactagttgtccctggcactgcttatacatatgtccatcaaatcaatcctatgaagtagatactgtcttcattttatagatcagagacaattggggttcagagagctgatgtgattttcccagggtcacagagagtcccagattcaggcacaactcttgtattccaagacacaaccactacatgtccaaaggctgcccagagccaccgggcacggcaaattgtgacatatccctaaagaggctgagcacctggtcaggatctgatggctgacagtgtgtccagatgcagagctggagtgggggaggggaaggggggctccttgggacagagaaggctttctgtgctttctctgaagggagcagtctgaggaccaagggaacccggcaaacagcacctcaggtactccaggccctcctggctggagagggctgtggcaatggaaaattagtgccaactgcaatgagtcagcctcggttaaatagagagtgaagaatgctggacaggaacctccaccctcatgtcacatttcttcagtgtgacccttctggcccctctcctcctgacagcggaacaatgactgccccgataggtgaggctggaggaagaatcagtcctgtccttggcaagctcttcactatgacagtaaaggctctctgcctgctgccaaggcctgtgactttctaacctggcctcacgctgggtaagcttaaggtagaggtgcaggattagcaagcccacctggctaccaggccgacagctacatctttcaactgaccctgatcaacgaagagggacttgtgtctctcagttggttccaaatgaaaccagggagcaggggcgttaggaagctccaacaggatggtacttaatggggcatttgagtggagaggtaggtgacatagtgctttggagcccagggagggaaaggttctgctgaagttgaattcaagactgttctttcatcacaaacttgagtttcctggacatttgtttgcagaaacaaccgtagggttttgccttaacctcgtgggtttattattacctcatagggactttgcctcctgacagcagtttatgggtgttcattgtggcacttgagttttcttgcatacttgttagagaaaccaagtttgtcatcaacttcttatttaaccccctggctataacttcatggattatgttataattaagccatccagagtaaaatctgtttagattatcttggagtaagggggaaaaaatctgtaattttttctcctcaactagatatatacataaaaaatgattgtattgcttcatttaaaaaatataacgcaaaatctcttttccttctaaaaaaaaaaaaaaaaaa

SEQ ID NO: 7702 - DNA, 2859 bp, Homo Sapiens
  NM_001831
ctttccgcggcattctttgggcgtgagtcatgcaggtttgcagccagccccaaagggggtgtgtgcgcgagcagagcgctataaatacggcgcctcccagtgcccacaacgcggcgtcgccaggaggagcgcgcgggcacagggtgccgctgaccgaggcgtgcaaagactccagaattggaggcatgatgaagactctgctgctgtttgtggggctgctgctgacctgggagagtgggcaggtcctgggggaccagacggtctcagacaatgagctccaggaaatgtccaatcagggaagtaagtacgtcaataaggaaattcaaaatgctgtcaacggggtgaaacagataaagactctcatagaaaaaacaaacgaagagcgcaagacactgctcagcaacctagaagaagccaagaagaagaaagaggatgccctaaatgagaccagggaatcagagacaaagctgaaggagctcccaggagtgtgcaatgagaccatgatggccctctgggaagagtgtaagccctgcctgaaacagacctgcatgaagttctacgcacgcgtctgcagaagtggctcaggcctggttggccgccagcttgaggagttcctgaaccagagctcgcccttctacttctggatgaatggtgaccgcatcgactccctgctggagaacgaccggcagcagacgcacatgctggatgtcatgcaggaccacttcagccgcgcgtccagcatcatagacgagctcttccaggacaggttcttcacccgggagccccaggatacctaccactacctgcccttcagcctgccccaccggaggcctcacttcttctttcccaagtcccgcatcgtccgcagcttgatgcccttctctccgtacgagcccctgaacttccacgccatgttccagcccttccttgagatgatacacgaggctcagcaggccatggacatccacttccatagcccggccttccagcacccgccaacagaattcatacgagaaggcgacgatgaccggactgtgtgccgggagatccgccacaactccacgggctgcctgcggatgaaggaccagtgtgacaagtgccgggagatcttgtctgtggactgttccaccaacaacccctcccaggctaagctgcggcgggagctcgacgaatccctccaggtcgctgagaggttgaccaggaaatacaacgagctgctaaagtcctaccagtggaagatgctcaacacctcctccttgctggagcagctgaacgagcagtttaactgggtgtcccggctggcaaacctcacgcaaggcgaagaccagtactatctgcgggtcaccacggtggcttcccacacttctgactcggacgttccttccggtgtcactgaggtggtcgtgaagctctttgactctgatcccatcactgtgacggtccctgtagaagtctccaggaagaaccctaaatttatggagaccgtggcggagaaagcgctgcaggaataccgcaaaaagcaccgggaggagtgagatgtggatgttgcttttgcacctacgggggcatctgagtccagctccccccaagatgagctgcagccccccagagagagctctgcacgtcaccaagtaaccaggccccagcctccaggcccccaactccgcccagcctctccccgctctggatcctgcactctaacactcgactctgctgctcatgggaagaacagaattgctcctgcatgcaactaattcaataaaactgtcttgtgagctgatcgcttggagggtcctctttttatgttgagttgctgcttcccggcatgccttcattttgctatggggggcaggcaggggggatggaaaataagtagaaacaaaaaagcagtggctaagatggtatagggactgtcataccagtgaagaataaaagggtgaagaataaaagggatatgatgacaaggttgatccacttcaagaattgcttgctttcaggaagagagatgtgtttcaacaagccaactaaaatatattgctgcaaatggaagcttttctgttctattataaaactgtcgatgtattctgaccaaggtgcgacaatctcctaaaggaatacactgaaagttaaggagaagaatcagtaagtgtaaggtgtacttggtattataatgcataattgatgttttcgttatgaaaacatttggtgcccagaagtccaaattatcagttttatttgtaagagctattgcttttgcagcggttttatttgtaaaagctgttgatttcgagttgtaagagctcagcatcccaggggcatcttcttgactgtggcatttcctgtccaccgccggtttatatgatcttcatacctttccctggaccacaggcgtttctcggcttttagtctgaaccatagctgggctgcagtaccctacgctgccagcaggtggccatgactacccgtggtaccaatctcagtcttaaagctcaggcttttcgttcattaacattctctgatagaattctggtcatcagatgtactgcaatggaacaaaactcatctggctgcatcccaggtgtgtagcaaagtccacatgtaaatttatagcttagaatattcttaagtcactgtcccttgtctctctttgaagttataaacaacaaacttaaagcttagcttatgtccaaggtaagtattttagcatggctgtcaaggaaattcagagtaaagtcagtgtgattcacttaatgatatacattaattagaattatggggtcagaggtatttgcttaagtgatcataattgtaaagtatatgtcacattgtcacattaatgtcaaaaaaaaaaaaaaaaaa

SEQ ID NO: 7703 - DNA, 2979 bp, Homo Sapiens
  NM_203339
gggcagcctgctgtcggcttagaggggatgggcagtgtggagggcctggcagagcaagaggactcatccttccaaagggactttctctgggaagcctgctcctcgggccactgcgaaccctctctactctccgaagggaattgtccttcctggcttccactacttccacccctgaatgcacaggcagcccggcccaagtctcccactagggatgcagatggattcggtgtgaagggctggctgctgttgcctccggctcttgaaagtcaagttcagaggcgtgcaaagactccagaattggaggcatgatgaagactctgctgctgtttgtggggctgctgctgacctgggagagtgggcaggtcctgggggaccagacggtctcagacaatgagctccaggaaatgtccaatcagggaagtaagtacgtcaataaggaaattcaaaatgctgtcaacggggtgaaacagataaagactctcatagaaaaaacaaacgaagagcgcaagacactgctcagcaacctagaagaagccaagaagaagaaagaggatgccctaaatgagaccagggaatcagagacaaagctgaaggagctcccaggagtgtgcaatgagaccatgatggccctctgggaagagtgtaagccctgcctgaaacagacctgcatgaagttctacgcacgcgtctgcagaagtggctcaggcctggttggccgccagcttgaggagttcctgaaccagagctcgcccttctacttctggatgaatggtgaccgcatcgactccctgctggagaacgaccggcagcagacgcacatgctggatgtcatgcaggaccacttcagccgcgcgtccagcatcatagacgagctcttccaggacaggttcttcacccgggagccccaggatacctaccactacctgcccttcagcctgccccaccggaggcctcacttcttctttcccaagtcccgcatcgtccgcagcttgatgcccttctctccgtacgagcccctgaacttccacgccatgttccagcccttccttgagatgatacacgaggctcagcaggccatggacatccacttccatagcccggccttccagcacccgccaacagaattcatacgagaaggcgacgatgaccggactgtgtgccgggagatccgccacaactccacgggctgcctgcggatgaaggaccagtgtgacaagtgccgggagatcttgtctgtggactgttccaccaacaacccctcccaggctaagctgcggcgggagctcgacgaatccctccaggtcgctgagaggttgaccaggaaatacaacgagctgctaaagtcctaccagtggaagatgctcaacacctcctccttgctggagcagctgaacgagcagtttaactgggtgtcccggctggcaaacctcacgcaaggcgaagaccagtactatctgcgggtcaccacggtggcttcccacacttctgactcggacgttccttccggtgtcactgaggtggtcgtgaagctctttgactctgatcccatcactgtgacggtccctgtagaagtctccaggaagaaccctaaatttatggagaccgtggcggagaaagcgctgcaggaataccgcaaaaagcaccgggaggagtgagatgtggatgttgcttttgcacctacgggggcatctgagtccagctccccccaagatgagctgcagccccccagagagagctctgcacgtcaccaagtaaccaggccccagcctccaggcccccaactccgcccagcctctccccgctctggatcctgcactctaacactcgactctgctgctcatgggaagaacagaattgctcctgcatgcaactaattcaataaaactgtcttgtgagctgatcgcttggagggtcctctttttatgttgagttgctgcttcccggcatgccttcattttgctatggggggcaggcaggggggatggaaaataagtagaaacaaaaaagcagtggctaagatggtatagggactgtcataccagtgaagaataaaagggtgaagaataaaagggatatgatgacaaggttgatccacttcaagaattgcttgctttcaggaagagagatgtgtttcaacaagccaactaaaatatattgctgcaaatggaagcttttctgttctattataaaactgtcgatgtattctgaccaaggtgcgacaatctcctaaaggaatacactgaaagttaaggagaagaatcagtaagtgtaaggtgtacttggtattataatgcataattgatgttttcgttatgaaaacatttggtgcccagaagtccaaattatcagttttatttgtaagagctattgcttttgcagcggttttatttgtaaaagctgttgatttcgagttgtaagagctcagcatcccaggggcatcttcttgactgtggcatttcctgtccaccgccggtttatatgatcttcatacctttccctggaccacaggcgtttctcggcttttagtctgaaccatagctgggctgcagtaccctacgctgccagcaggtggccatgactacccgtggtaccaatctcagtcttaaagctcaggcttttcgttcattaacattctctgatagaattctggtcatcagatgtactgcaatggaacaaaactcatctggctgcatcccaggtgtgtagcaaagtccacatgtaaatttatagcttagaatattcttaagtcactgtcccttgtctctctttgaagttataaacaacaaacttaaagcttagcttatgtccaaggtaagtattttagcatggctgtcaaggaaattcagagtaaagtcagtgtgattcacttaatgatatacattaattagaattatggggtcagaggtatttgcttaagtgatcataattgtaaagtatatgtcacattgtcacattaatgtcaaaaaaaaaaaaaaaaaa

SEQ ID NO: 7704 - DNA, 2854 bp, Homo Sapiens
  NM_001171138
tctttgcgcctgattacttctcatgagaggcactccttgttaatgtgctactgagtgtccagatgggcctgctgggctgagcgggctttggatgtgaaccatttcaggaaggggaaccccatcgtcctgttggttctgtgatggcaaatggaggcgtgcaaagactccagaattggaggcatgatgaagactctgctgctgtttgtggggctgctgctgacctgggagagtgggcaggtcctgggggaccagacggtctcagacaatgagctccaggaaatgtccaatcagggaagtaagtacgtcaataaggaaattcaaaatgctgtcaacggggtgaaacagataaagactctcatagaaaaaacaaacgaagagcgcaagacactgctcagcaacctagaagaagccaagaagaagaaagaggatgccctaaatgagaccagggaatcagagacaaagctgaaggagctcccaggagtgtgcaatgagaccatgatggccctctgggaagagtgtaagccctgcctgaaacagacctgcatgaagttctacgcacgcgtctgcagaagtggctcaggcctggttggccgccagcttgaggagttcctgaaccagagctcgcccttctacttctggatgaatggtgaccgcatcgactccctgctggagaacgaccggcagcagacgcacatgctggatgtcatgcaggaccacttcagccgcgcgtccagcatcatagacgagctcttccaggacaggttcttcacccgggagccccaggatacctaccactacctgcccttcagcctgccccaccggaggcctcacttcttctttcccaagtcccgcatcgtccgcagcttgatgcccttctctccgtacgagcccctgaacttccacgccatgttccagcccttccttgagatgatacacgaggctcagcaggccatggacatccacttccatagcccggccttccagcacccgccaacagaattcatacgagaaggcgacgatgaccggactgtgtgccgggagatccgccacaactccacgggctgcctgcggatgaaggaccagtgtgacaagtgccgggagatcttgtctgtggactgttccaccaacaacccctcccaggctaagctgcggcgggagctcgacgaatccctccaggtcgctgagaggttgaccaggaaatacaacgagctgctaaagtcctaccagtggaagatgctcaacacctcctccttgctggagcagctgaacgagcagtttaactgggtgtcccggctggcaaacctcacgcaaggcgaagaccagtactatctgcgggtcaccacggtggcttcccacacttctgactcggacgttccttccggtgtcactgaggtggtcgtgaagctctttgactctgatcccatcactgtgacggtccctgtagaagtctccaggaagaaccctaaatttatggagaccgtggcggagaaagcgctgcaggaataccgcaaaaagcaccgggaggagtgagatgtggatgttgcttttgcacctacgggggcatctgagtccagctccccccaagatgagctgcagccccccagagagagctctgcacgtcaccaagtaaccaggccccagcctccaggcccccaactccgcccagcctctccccgctctggatcctgcactctaacactcgactctgctgctcatgggaagaacagaattgctcctgcatgcaactaattcaataaaactgtcttgtgagctgatcgcttggagggtcctctttttatgttgagttgctgcttcccggcatgccttcattttgctatggggggcaggcaggggggatggaaaataagtagaaacaaaaaagcagtggctaagatggtatagggactgtcataccagtgaagaataaaagggtgaagaataaaagggatatgatgacaaggttgatccacttcaagaattgcttgctttcaggaagagagatgtgtttcaacaagccaactaaaatatattgctgcaaatggaagcttttctgttctattataaaactgtcgatgtattctgaccaaggtgcgacaatctcctaaaggaatacactgaaagttaaggagaagaatcagtaagtgtaaggtgtacttggtattataatgcataattgatgttttcgttatgaaaacatttggtgcccagaagtccaaattatcagttttatttgtaagagctattgcttttgcagcggttttatttgtaaaagctgttgatttcgagttgtaagagctcagcatcccaggggcatcttcttgactgtggcatttcctgtccaccgccggtttatatgatcttcatacctttccctggaccacaggcgtttctcggcttttagtctgaaccatagctgggctgcagtaccctacgctgccagcaggtggccatgactacccgtggtaccaatctcagtcttaaagctcaggcttttcgttcattaacattctctgatagaattctggtcatcagatgtactgcaatggaacaaaactcatctggctgcatcccaggtgtgtagcaaagtccacatgtaaatttatagcttagaatattcttaagtcactgtcccttgtctctctttgaagttataaacaacaaacttaaagcttagcttatgtccaaggtaagtattttagcatggctgtcaaggaaattcagagtaaagtcagtgtgattcacttaatgatatacattaattagaattatggggtcagaggtatttgcttaagtgatcataattgtaaagtatatgtcacattgtcacattaatgtcaaaaaaaaaaaaaaaaaa

SEQ ID NO: 7705 - DNA, 20 bp, Homo Sapiens
  Primer 1
cacacctttcacaagggcaa

SEQ ID NO: 7706 - DNA, 20 bp, Homo Sapiens
  Primer 2
ctccatctgcaaaagtcagc

SEQ ID NO: 7707 - DNA, 20 bp, Homo Sapiens
  Primer 3
acaacgagctgctaaagtcc

SEQ ID NO: 7708 - DNA, 20 bp, Homo Sapiens
  Primer 4
gatagtactggtcttcgcct

SEQ ID NO: 7709 - DNA, 20 bp, Homo Sapiens
  Primer 5
gtggaaggtgattgtttcgc

SEQ ID NO: 7710 - DNA, 20 bp, Homo Sapiens
  Primer 6
ggatcttcccagcttcaatg

SEQ ID NO: 7711 - DNA, 19 bp, Homo Sapiens
  Primer 7
ctggtggctacaagtcctc

SEQ ID NO: 7712 - DNA, 21 bp, Homo Sapiens
  Primer 8
agtgctgaaggaattaattgc

SEQ ID NO: 7713 - DNA, 24 bp, Homo Sapiens
  Primer 9
cttctcacttcatgtgaaaactac

SEQ ID NO: 7714 - DNA, 23 bp, Homo Sapiens
  Primer 10
ccatattagtgctaccaaagtgt

SEQ ID NO: 7715 - DNA, 21 bp, Homo Sapiens
  Primer 11
gaggatgtagtcatcactcca

SEQ ID NO: 7716 - DNA, 21 bp, Homo Sapiens
  Primer 12
ccattcttgccactctccctg

SEQ ID NO: 7717 - DNA, 18 bp, Homo Sapiens
  Primer 13
gtgtaccctgactcgttc

SEQ ID NO: 7718 - DNA, 21 bp, Homo Sapiens
  Primer 14
agagtgacagtgcatacaatg
